United States Patent Application Publication US 2017/0073685 A1 - sequence listing, part 2

SEQ ID NO: 4917 - RNA, 20 nt, Artificial Sequence
  Synthetic
cauccccgccuacuacgccg

SEQ ID NO: 4918 - RNA, 20 nt, Artificial Sequence
  Synthetic
cgccgccgggcccgcgcaac

SEQ ID NO: 4919 - RNA, 20 nt, Artificial Sequence
  Synthetic
cgcgcaacgcggggugaucg

SEQ ID NO: 4920 - RNA, 20 nt, Artificial Sequence
  Synthetic
ugaucggcgaguacugcaua

SEQ ID NO: 4921 - RNA, 20 nt, Artificial Sequence
  Synthetic
gcauacaggauucccugcug

SEQ ID NO: 4922 - RNA, 20 nt, Artificial Sequence
  Synthetic
uuuuuaaguuuuugccccau

SEQ ID NO: 4923 - RNA, 20 nt, Artificial Sequence
  Synthetic
uuuuaaguuuuugccccauc

SEQ ID NO: 4924 - RNA, 20 nt, Artificial Sequence
  Synthetic
ucucggccgucgcgcgcuug

SEQ ID NO: 4925 - RNA, 20 nt, Artificial Sequence
  Synthetic
gccugcugcgccuggccgac

SEQ ID NO: 4926 - RNA, 20 nt, Artificial Sequence
  Synthetic
ugcugcgccuggccgaccag

SEQ ID NO: 4927 - RNA, 20 nt, Artificial Sequence
  Synthetic
accagaagggcuuuauucug

SEQ ID NO: 4928 - RNA, 20 nt, Artificial Sequence
  Synthetic
gcuuuauucugccggacacc

SEQ ID NO: 4929 - RNA, 20 nt, Artificial Sequence
  Synthetic
cuuuauucugccggacaccc

SEQ ID NO: 4930 - RNA, 20 nt, Artificial Sequence
  Synthetic
ccggacacccaggggcgauu

SEQ ID NO: 4931 - RNA, 20 nt, Artificial Sequence
  Synthetic
cggacacccaggggcgauuu

SEQ ID NO: 4932 - RNA, 20 nt, Artificial Sequence
  Synthetic
ccaggggcgauuuaggggcg

SEQ ID NO: 4933 - RNA, 20 nt, Artificial Sequence
  Synthetic
caggggcgauuuaggggcgc

SEQ ID NO: 4934 - RNA, 20 nt, Artificial Sequence
  Synthetic
aggggcgauuuaggggcgcc

SEQ ID NO: 4935 - RNA, 20 nt, Artificial Sequence
  Synthetic
ggggcgauuuaggggcgccg

SEQ ID NO: 4936 - RNA, 20 nt, Artificial Sequence
  Synthetic
gggcgauuuaggggcgccgg

SEQ ID NO: 4937 - RNA, 20 nt, Artificial Sequence
  Synthetic
ggcgauuuaggggcgccggg

SEQ ID NO: 4938 - RNA, 20 nt, Artificial Sequence
  Synthetic
gcgauuuaggggcgccgggg

SEQ ID NO: 4939 - RNA, 20 nt, Artificial Sequence
  Synthetic
cccaagcguccggccgcagc

SEQ ID NO: 4940 - RNA, 20 nt, Artificial Sequence
  Synthetic
ccaagcguccggccgcagcc

SEQ ID NO: 4941 - RNA, 20 nt, Artificial Sequence
  Synthetic
caagcguccggccgcagccc

SEQ ID NO: 4942 - RNA, 20 nt, Artificial Sequence
  Synthetic
agcguccggccgcagcccgg

SEQ ID NO: 4943 - RNA, 20 nt, Artificial Sequence
  Synthetic
uccggccgcagcccgggagg

SEQ ID NO: 4944 - RNA, 20 nt, Artificial Sequence
  Synthetic
cggccgcagcccgggaggac

SEQ ID NO: 4945 - RNA, 20 nt, Artificial Sequence
  Synthetic
ccgggaggacgaggagcggc

SEQ ID NO: 4946 - RNA, 20 nt, Artificial Sequence
  Synthetic
gggaggacgaggagcggcca

SEQ ID NO: 4947 - RNA, 20 nt, Artificial Sequence
  Synthetic
aggacgaggagcggccagag

SEQ ID NO: 4948 - RNA, 20 nt, Artificial Sequence
  Synthetic
acgaggagcggccagaggag

SEQ ID NO: 4949 - RNA, 20 nt, Artificial Sequence
  Synthetic
agcggccagaggaggagggg

SEQ ID NO: 4950 - RNA, 20 nt, Artificial Sequence
  Synthetic
gccagaggaggagggggagg

SEQ ID NO: 4951 - RNA, 20 nt, Artificial Sequence
  Synthetic
cagaggaggagggggaggac

SEQ ID NO: 4952 - RNA, 20 nt, Artificial Sequence
  Synthetic
ggaggagggggaggacgagg

SEQ ID NO: 4953 - RNA, 20 nt, Artificial Sequence
  Synthetic
gggggaggacgaggacgaac

SEQ ID NO: 4954 - RNA, 20 nt, Artificial Sequence
  Synthetic
gggaggacgaggacgaacgc

SEQ ID NO: 4955 - RNA, 20 nt, Artificial Sequence
  Synthetic
aggacgaggacgaacgcgag

SEQ ID NO: 4956 - RNA, 20 nt, Artificial Sequence
  Synthetic
cgaggacgaacgcgaggagg

SEQ ID NO: 4957 - RNA, 20 nt, Artificial Sequence
  Synthetic
cgaacgcgaggagggcgggg

SEQ ID NO: 4958 - RNA, 20 nt, Artificial Sequence
  Synthetic
cgcgaggagggcgggggcga

SEQ ID NO: 4959 - RNA, 20 nt, Artificial Sequence
  Synthetic
agggcgggggcgagcgggag

SEQ ID NO: 4960 - RNA, 20 nt, Artificial Sequence
  Synthetic
gcgggggcgagcgggagccg

SEQ ID NO: 4961 - RNA, 20 nt, Artificial Sequence
  Synthetic
gagcgggagccggagggcgc

SEQ ID NO: 4962 - RNA, 20 nt, Artificial Sequence
  Synthetic
gggagaccgccggcaggcac

SEQ ID NO: 4963 - RNA, 20 nt, Artificial Sequence
  Synthetic
ccggcaggcacgugggguac

SEQ ID NO: 4964 - RNA, 20 nt, Artificial Sequence
  Synthetic
cggcaggcacgugggguacc

SEQ ID NO: 4965 - RNA, 20 nt, Artificial Sequence
  Synthetic
ggcaggcacgugggguacca

SEQ ID NO: 4966 - RNA, 20 nt, Artificial Sequence
  Synthetic
cacgugggguaccagggggc

SEQ ID NO: 4967 - RNA, 20 nt, Artificial Sequence
  Synthetic
caggguccuugaccccacuu

SEQ ID NO: 4968 - RNA, 20 nt, Artificial Sequence
  Synthetic
accccacuuccggguuucac

SEQ ID NO: 4969 - RNA, 20 nt, Artificial Sequence
  Synthetic
ugugcuucagcacgcucucc

SEQ ID NO: 4970 - RNA, 20 nt, Artificial Sequence
  Synthetic
ugcuucagcacgcucucccu

SEQ ID NO: 4971 - RNA, 20 nt, Artificial Sequence
  Synthetic
gggccgacgcaguggcgcac

SEQ ID NO: 4972 - RNA, 20 nt, Artificial Sequence
  Synthetic
ggccgacgcaguggcgcacc

SEQ ID NO: 4973 - RNA, 20 nt, Artificial Sequence
  Synthetic
acgcaguggcgcaccuggag

SEQ ID NO: 4974 - RNA, 20 nt, Artificial Sequence
  Synthetic
uggcgcaccuggaggcgggc

SEQ ID NO: 4975 - RNA, 20 nt, Artificial Sequence
  Synthetic
uggaggcgggcaaggacuac

SEQ ID NO: 4976 - RNA, 20 nt, Artificial Sequence
  Synthetic
ggaggcgggcaaggacuacc

SEQ ID NO: 4977 - RNA, 20 nt, Artificial Sequence
  Synthetic
gggcaaggacuaccuggaga

SEQ ID NO: 4978 - RNA, 20 nt, Artificial Sequence
  Synthetic
aggacuaccuggagaucgag

SEQ ID NO: 4979 - RNA, 20 nt, Artificial Sequence
  Synthetic
ggacuaccuggagaucgagg

SEQ ID NO: 4980 - RNA, 20 nt, Artificial Sequence
  Synthetic
gacuaccuggagaucgaggu

SEQ ID NO: 4981 - RNA, 20 nt, Artificial Sequence
  Synthetic
acuaccuggagaucgaggug

SEQ ID NO: 4982 - RNA, 20 nt, Artificial Sequence
  Synthetic
cuaccuggagaucgaggugg

SEQ ID NO: 4983 - RNA, 20 nt, Artificial Sequence
  Synthetic
uucuucgucaaggcucacgu

SEQ ID NO: 4984 - RNA, 20 nt, Artificial Sequence
  Synthetic
cuucgucaaggcucacgugc

SEQ ID NO: 4985 - RNA, 20 nt, Artificial Sequence
  Synthetic
ucgucaaggcucacgugcga

SEQ ID NO: 4986 - RNA, 20 nt, Artificial Sequence
  Synthetic
agccuccucagcauccuccu

SEQ ID NO: 4987 - RNA, 20 nt, Artificial Sequence
  Synthetic
gccuccucagcauccuccug

SEQ ID NO: 4988 - RNA, 20 nt, Artificial Sequence
  Synthetic
cugcgggacuggcucgccau

SEQ ID NO: 4989 - RNA, 20 nt, Artificial Sequence
  Synthetic
augcgaaagcagauccgcuc

SEQ ID NO: 4990 - RNA, 20 nt, Artificial Sequence
  Synthetic
agauccgcucgcggauuccc

SEQ ID NO: 4991 - RNA, 20 nt, Artificial Sequence
  Synthetic
gcggauuccccagagcagcc

SEQ ID NO: 4992 - RNA, 20 nt, Artificial Sequence
  Synthetic
ggauuccccagagcagcccc

SEQ ID NO: 4993 - RNA, 20 nt, Artificial Sequence
  Synthetic
gauuccccagagcagccccg

SEQ ID NO: 4994 - RNA, 20 nt, Artificial Sequence
  Synthetic
gccccgaggaggccgugcuc

SEQ ID NO: 4995 - RNA, 20 nt, Artificial Sequence
  Synthetic
ggucguguguaacucggugu

SEQ ID NO: 4996 - RNA, 20 nt, Artificial Sequence
  Synthetic
guaacucgguguacggguuc

SEQ ID NO: 4997 - RNA, 20 nt, Artificial Sequence
  Synthetic
uaacucgguguacggguuca

SEQ ID NO: 4998 - RNA, 20 nt, Artificial Sequence
  Synthetic
aacucgguguacggguucac

SEQ ID NO: 4999 - RNA, 20 nt, Artificial Sequence
  Synthetic
cggguucacgggagugcagc

SEQ ID NO: 5000 - RNA, 20 nt, Artificial Sequence
  Synthetic
gacggugacgaccaucggcc

SEQ ID NO: 5001 - RNA, 20 nt, Artificial Sequence
  Synthetic
cgagaugcugcucgcgaccc

SEQ ID NO: 5002 - RNA, 20 nt, Artificial Sequence
  Synthetic
cgcgaguacguccacgcgcg

SEQ ID NO: 5003 - RNA, 20 nt, Artificial Sequence
  Synthetic
ccacgcgcgcugggcggccu

SEQ ID NO: 5004 - RNA, 20 nt, Artificial Sequence
  Synthetic
aacagcuccuggccgauuuc

SEQ ID NO: 5005 - RNA, 20 nt, Artificial Sequence
  Synthetic
acagcuccuggccgauuucc

SEQ ID NO: 5006 - RNA, 20 nt, Artificial Sequence
  Synthetic
ggcggccgacaugcgcgccc

SEQ ID NO: 5007 - RNA, 20 nt, Artificial Sequence
  Synthetic
cuauuccaugcgcaucaucu

SEQ ID NO: 5008 - RNA, 20 nt, Artificial Sequence
  Synthetic
uauuccaugcgcaucaucua

SEQ ID NO: 5009 - RNA, 20 nt, Artificial Sequence
  Synthetic
auuccaugcgcaucaucuac

SEQ ID NO: 5010 - RNA, 20 nt, Artificial Sequence
  Synthetic
ugcgcaucaucuacggggac

SEQ ID NO: 5011 - RNA, 20 nt, Artificial Sequence
  Synthetic
gugccgcggccucacggccg

SEQ ID NO: 5012 - RNA, 20 nt, Artificial Sequence
  Synthetic
cggccgccgggcugacggcc

SEQ ID NO: 5013 - RNA, 20 nt, Artificial Sequence
  Synthetic
cggccgugggcgacaagaug

SEQ ID NO: 5014 - RNA, 20 nt, Artificial Sequence
  Synthetic
guuucugccccccaucaaac

SEQ ID NO: 5015 - RNA, 20 nt, Artificial Sequence
  Synthetic
gccccccaucaaacucgagu

SEQ ID NO: 5016 - RNA, 20 nt, Artificial Sequence
  Synthetic
ccaagcugcugcugaucgcc

SEQ ID NO: 5017 - RNA, 20 nt, Artificial Sequence
  Synthetic
aaaguacaucggcgucaucu

SEQ ID NO: 5018 - RNA, 20 nt, Artificial Sequence
  Synthetic
aaguacaucggcgucaucua

SEQ ID NO: 5019 - RNA, 20 nt, Artificial Sequence
  Synthetic
aguacaucggcgucaucuac

SEQ ID NO: 5020 - RNA, 20 nt, Artificial Sequence
  Synthetic
acggggguaagaugcucauc

SEQ ID NO: 5021 - RNA, 20 nt, Artificial Sequence
  Synthetic
guaagaugcucaucaagggc

SEQ ID NO: 5022 - RNA, 20 nt, Artificial Sequence
  Synthetic
gcguuuaucaaccgcaccuc

SEQ ID NO: 5023 - RNA, 20 nt, Artificial Sequence
  Synthetic
guuuuacgacgauaccgucu

SEQ ID NO: 5024 - RNA, 20 nt, Artificial Sequence
  Synthetic
uuuuacgacgauaccgucuc

SEQ ID NO: 5025 - RNA, 20 nt, Artificial Sequence
  Synthetic
cggagcggccgccgcguuag

SEQ ID NO: 5026 - RNA, 20 nt, Artificial Sequence
  Synthetic
ccgcguuagccgagcgcccc

SEQ ID NO: 5027 - RNA, 20 nt, Artificial Sequence
  Synthetic
cgcguuagccgagcgccccg

SEQ ID NO: 5028 - RNA, 20 nt, Artificial Sequence
  Synthetic
cguuagccgagcgccccgcg

SEQ ID NO: 5029 - RNA, 20 nt, Artificial Sequence
  Synthetic
guuagccgagcgccccgcgg

SEQ ID NO: 5030 - RNA, 20 nt, Artificial Sequence
  Synthetic
guggcuggcgcgaccccugc

SEQ ID NO: 5031 - RNA, 20 nt, Artificial Sequence
  Synthetic
ggcuggcgcgaccccugccc

SEQ ID NO: 5032 - RNA, 20 nt, Artificial Sequence
  Synthetic
gcuggcgcgaccccugcccg

SEQ ID NO: 5033 - RNA, 20 nt, Artificial Sequence
  Synthetic
gcccgagggacugcaggcgu

SEQ ID NO: 5034 - RNA, 20 nt, Artificial Sequence
  Synthetic
cccgagggacugcaggcguu

SEQ ID NO: 5035 - RNA, 20 nt, Artificial Sequence
  Synthetic
cccaucggcgcaucaccgac

SEQ ID NO: 5036 - RNA, 20 nt, Artificial Sequence
  Synthetic
ccaucggcgcaucaccgacc

SEQ ID NO: 5037 - RNA, 20 nt, Artificial Sequence
  Synthetic
aucggcgcaucaccgacccg

SEQ ID NO: 5038 - RNA, 20 nt, Artificial Sequence
  Synthetic
cggcgcaucaccgacccgga

SEQ ID NO: 5039 - RNA, 20 nt, Artificial Sequence
  Synthetic
ggcgcaucaccgacccggag

SEQ ID NO: 5040 - RNA, 20 nt, Artificial Sequence
  Synthetic
ccgacccggagagggacauc

SEQ ID NO: 5041 - RNA, 20 nt, Artificial Sequence
  Synthetic
ccaggacuuuguccucaccg

SEQ ID NO: 5042 - RNA, 20 nt, Artificial Sequence
  Synthetic
acuuuguccucaccgccgaa

SEQ ID NO: 5043 - RNA, 20 nt, Artificial Sequence
  Synthetic
gcgcgcaggucccguccauc

SEQ ID NO: 5044 - RNA, 20 nt, Artificial Sequence
  Synthetic
caggucccguccaucaagga

SEQ ID NO: 5045 - RNA, 20 nt, Artificial Sequence
  Synthetic
cgugaucguggcccagaccc

SEQ ID NO: 5046 - RNA, 20 nt, Artificial Sequence
  Synthetic
cguggcccagacccgcgagg

SEQ ID NO: 5047 - RNA, 20 nt, Artificial Sequence
  Synthetic
uggcccagacccgcgaggua

SEQ ID NO: 5048 - RNA, 20 nt, Artificial Sequence
  Synthetic
ggcccagacccgcgagguag

SEQ ID NO: 5049 - RNA, 20 nt, Artificial Sequence
  Synthetic
cgcgcggcuggccgcccucc

SEQ ID NO: 5050 - RNA, 20 nt, Artificial Sequence
  Synthetic
cgagcuagacgccgccgccc

SEQ ID NO: 5051 - RNA, 20 nt, Artificial Sequence
  Synthetic
gagcuagacgccgccgcccc

SEQ ID NO: 5052 - RNA, 20 nt, Artificial Sequence
  Synthetic
agcuagacgccgccgcccca

SEQ ID NO: 5053 - RNA, 20 nt, Artificial Sequence
  Synthetic
agacgccgccgccccagggg

SEQ ID NO: 5054 - RNA, 20 nt, Artificial Sequence
  Synthetic
cccuccccggccaagcgccc

SEQ ID NO: 5055 - RNA, 20 nt, Artificial Sequence
  Synthetic
ccuccccggccaagcgcccc

SEQ ID NO: 5056 - RNA, 20 nt, Artificial Sequence
  Synthetic
cuccccggccaagcgccccc

SEQ ID NO: 5057 - RNA, 20 nt, Artificial Sequence
  Synthetic
cgccgucgccugccgacccc

SEQ ID NO: 5058 - RNA, 20 nt, Artificial Sequence
  Synthetic
gccgucgccugccgaccccc

SEQ ID NO: 5059 - RNA, 20 nt, Artificial Sequence
  Synthetic
ccgucgccugccgacccccc

SEQ ID NO: 5060 - RNA, 20 nt, Artificial Sequence
  Synthetic
gccccgcaagcugcuggugu

SEQ ID NO: 5061 - RNA, 20 nt, Artificial Sequence
  Synthetic
gcugcugguguccgagcugg

SEQ ID NO: 5062 - RNA, 20 nt, Artificial Sequence
  Synthetic
ugcugguguccgagcuggcc

SEQ ID NO: 5063 - RNA, 20 nt, Artificial Sequence
  Synthetic
ccauugcccacggcgucgcc

SEQ ID NO: 5064 - RNA, 20 nt, Artificial Sequence
  Synthetic
cccacggcgucgcccugaac

SEQ ID NO: 5065 - RNA, 20 nt, Artificial Sequence
  Synthetic
acuauuacuucucccaccug

SEQ ID NO: 5066 - RNA, 20 nt, Artificial Sequence
  Synthetic
cuauuacuucucccaccugu

SEQ ID NO: 5067 - RNA, 20 nt, Artificial Sequence
  Synthetic
uauuacuucucccaccuguu

SEQ ID NO: 5068 - RNA, 20 nt, Artificial Sequence
  Synthetic
cgugacauucaaggcccugu

SEQ ID NO: 5069 - RNA, 20 nt, Artificial Sequence
  Synthetic
gugacauucaaggcccuguu

SEQ ID NO: 5070 - RNA, 20 nt, Artificial Sequence
  Synthetic
ugacauucaaggcccuguuu

SEQ ID NO: 5071 - RNA, 20 nt, Artificial Sequence
  Synthetic
ugggaauaacgccaagauca

SEQ ID NO: 5072 - RNA, 20 nt, Artificial Sequence
  Synthetic
ggaauaacgccaagaucacc

SEQ ID NO: 5073 - RNA, 20 nt, Artificial Sequence
  Synthetic
ucuguuaaaaagguuuauuc

SEQ ID NO: 5074 - RNA, 20 nt, Artificial Sequence
  Synthetic
uucccgaaguguggcacccc

SEQ ID NO: 5075 - RNA, 20 nt, Artificial Sequence
  Synthetic
gacgacguggccgcgcggcu

SEQ ID NO: 5076 - RNA, 20 nt, Artificial Sequence
  Synthetic
ggccgcgcggcuccggaccg

SEQ ID NO: 5077 - RNA, 20 nt, Artificial Sequence
  Synthetic
gcggcuccggaccgcagggu

SEQ ID NO: 5078 - RNA, 20 nt, Artificial Sequence
  Synthetic
cggcuccggaccgcaggguu

SEQ ID NO: 5079 - RNA, 20 nt, Artificial Sequence
  Synthetic
ggaccgcaggguucggggcg

SEQ ID NO: 5080 - RNA, 20 nt, Artificial Sequence
  Synthetic
cggugggugccggcgcuacg

SEQ ID NO: 5081 - RNA, 20 nt, Artificial Sequence
  Synthetic
ggugggugccggcgcuacgg

SEQ ID NO: 5082 - RNA, 20 nt, Artificial Sequence
  Synthetic
ugggugccggcgcuacggcg

SEQ ID NO: 5083 - RNA, 20 nt, Artificial Sequence
  Synthetic
gggugccggcgcuacggcgg

SEQ ID NO: 5084 - RNA, 20 nt, Artificial Sequence
  Synthetic
gcuacggcggaggaaacucg

SEQ ID NO: 5085 - RNA, 20 nt, Artificial Sequence
  Synthetic
gaaacucgucgaauguugca

SEQ ID NO: 5086 - RNA, 17 nt, Artificial Sequence
  Synthetic
uggacgccaucacaccg

SEQ ID NO: 5087 - RNA, 17 nt, Artificial Sequence
  Synthetic
ggacgccaucacaccga

SEQ ID NO: 5088 - RNA, 17 nt, Artificial Sequence
  Synthetic
gacgccaucacaccgac

SEQ ID NO: 5089 - RNA, 17 nt, Artificial Sequence
  Synthetic
ggaccgucaucacgcuc

SEQ ID NO: 5090 - RNA, 17 nt, Artificial Sequence
  Synthetic
cgcuccugggccugacu

SEQ ID NO: 5091 - RNA, 17 nt, Artificial Sequence
  Synthetic
gcuccugggccugacuc

SEQ ID NO: 5092 - RNA, 17 nt, Artificial Sequence
  Synthetic
cugacuccggaaggcca

SEQ ID NO: 5093 - RNA, 17 nt, Artificial Sequence
  Synthetic
cgcggcaguacuuuuac

SEQ ID NO: 5094 - RNA, 17 nt, Artificial Sequence
  Synthetic
aguacuuuuacaugaac

SEQ ID NO: 5095 - RNA, 17 nt, Artificial Sequence
  Synthetic
guacuuuuacaugaaca

SEQ ID NO: 5096 - RNA, 17 nt, Artificial Sequence
  Synthetic
acuuuuacaugaacaag

SEQ ID NO: 5097 - RNA, 17 nt, Artificial Sequence
  Synthetic
cuuuuacaugaacaagg

SEQ ID NO: 5098 - RNA, 17 nt, Artificial Sequence
  Synthetic
cuacaaugccgcgcccc

SEQ ID NO: 5099 - RNA, 17 nt, Artificial Sequence
  Synthetic
cgccccacgagaucucu

SEQ ID NO: 5100 - RNA, 17 nt, Artificial Sequence
  Synthetic
cauggccgcggcccugc

SEQ ID NO: 5101 - RNA, 17 nt, Artificial Sequence
  Synthetic
cggcccugcgcgagucc

SEQ ID NO: 5102 - RNA, 17 nt, Artificial Sequence
  Synthetic
cguuccgcggcaucucc

SEQ ID NO: 5103 - RNA, 17 nt, Artificial Sequence
  Synthetic
caucuccgcggaccacu

SEQ ID NO: 5104 - RNA, 17 nt, Artificial Sequence
  Synthetic
ccgcggaccacuucgag

SEQ ID NO: 5105 - RNA, 17 nt, Artificial Sequence
  Synthetic
cgcggaccacuucgagg

SEQ ID NO: 5106 - RNA, 17 nt, Artificial Sequence
  Synthetic
acuucgaggcggaggug

SEQ ID NO: 5107 - RNA, 17 nt, Artificial Sequence
  Synthetic
cuucgaggcggaggugg

SEQ ID NO: 5108 - RNA, 17 nt, Artificial Sequence
  Synthetic
caccgacguguacuacu

SEQ ID NO: 5109 - RNA, 17 nt, Artificial Sequence
  Synthetic
uuuuaccgcgucuacgu

SEQ ID NO: 5110 - RNA, 17 nt, Artificial Sequence
  Synthetic
ccgcgucuacguccgaa

SEQ ID NO: 5111 - RNA, 17 nt, Artificial Sequence
  Synthetic
acuucugcccggccauc

SEQ ID NO: 5112 - RNA, 17 nt, Artificial Sequence
  Synthetic
cccggccaucaagaagu

SEQ ID NO: 5113 - RNA, 17 nt, Artificial Sequence
  Synthetic
cggccaucaagaaguac

SEQ ID NO: 5114 - RNA, 17 nt, Artificial Sequence
  Synthetic
caucaagaaguacgagg

SEQ ID NO: 5115 - RNA, 17 nt, Artificial Sequence
  Synthetic
aucaagaaguacgaggg

SEQ ID NO: 5116 - RNA, 17 nt, Artificial Sequence
  Synthetic
ccaccacccgguucauc

SEQ ID NO: 5117 - RNA, 17 nt, Artificial Sequence
  Synthetic
guucauccuggacaacc

SEQ ID NO: 5118 - RNA, 17 nt, Artificial Sequence
  Synthetic
gcugguaccgucucaaa

SEQ ID NO: 5119 - RNA, 17 nt, Artificial Sequence
  Synthetic
uaccgucucaaaccggg

SEQ ID NO: 5120 - RNA, 17 nt, Artificial Sequence
  Synthetic
accgucucaaaccgggc

SEQ ID NO: 5121 - RNA, 17 nt, Artificial Sequence
  Synthetic
ggcggccccgauggccu

SEQ ID NO: 5122 - RNA, 17 nt, Artificial Sequence
  Synthetic
gcggccccgauggccuu

SEQ ID NO: 5123 - RNA, 17 nt, Artificial Sequence
  Synthetic
cgggacauccagcgacg

SEQ ID NO: 5124 - RNA, 17 nt, Artificial Sequence
  Synthetic
ucgaguuuaacuguacg

SEQ ID NO: 5125 - RNA, 17 nt, Artificial Sequence
  Synthetic
ggcggacaaccuggcca

SEQ ID NO: 5126 - RNA, 17 nt, Artificial Sequence
  Synthetic
cggacaaccuggccauc

SEQ ID NO: 5127 - RNA, 17 nt, Artificial Sequence
  Synthetic
ggacaaccuggccaucg

SEQ ID NO: 5128 - RNA, 17 nt, Artificial Sequence
  Synthetic
gacaaccuggccaucga

SEQ ID NO: 5129 - RNA, 17 nt, Artificial Sequence
  Synthetic
acaaccuggccaucgag

SEQ ID NO: 5130 - RNA, 17 nt, Artificial Sequence
  Synthetic
uggccaucgaggggggc

SEQ ID NO: 5131 - RNA, 17 nt, Artificial Sequence
  Synthetic
gcucaugugcuucgaua

SEQ ID NO: 5132 - RNA, 17 nt, Artificial Sequence
  Synthetic
ucgauaucgaaugcaag

SEQ ID NO: 5133 - RNA, 17 nt, Artificial Sequence
  Synthetic
cgauaucgaaugcaagg

SEQ ID NO: 5134 - RNA, 17 nt, Artificial Sequence
  Synthetic
gauaucgaaugcaaggc

SEQ ID NO: 5135 - RNA, 17 nt, Artificial Sequence
  Synthetic
auaucgaaugcaaggcg

SEQ ID NO: 5136 - RNA, 17 nt, Artificial Sequence
  Synthetic
uaucgaaugcaaggcgg

SEQ ID NO: 5137 - RNA, 17 nt, Artificial Sequence
  Synthetic
aucgaaugcaaggcggg

SEQ ID NO: 5138 - RNA, 17 nt, Artificial Sequence
  Synthetic
ucgaaugcaaggcgggg

SEQ ID NO: 5139 - RNA, 17 nt, Artificial Sequence
  Synthetic
cgaaugcaaggcggggg

SEQ ID NO: 5140 - RNA, 17 nt, Artificial Sequence
  Synthetic
aaugcaaggcggggggg

SEQ ID NO: 5141 - RNA, 17 nt, Artificial Sequence
  Synthetic
caaggcggggggggagg

SEQ ID NO: 5142 - RNA, 17 nt, Artificial Sequence
  Synthetic
gcuggccuuuccggugg

SEQ ID NO: 5143 - RNA, 17 nt, Artificial Sequence
  Synthetic
uuccgguggccgggcac

SEQ ID NO: 5144 - RNA, 17 nt, Artificial Sequence
  Synthetic
uccgguggccgggcacc

SEQ ID NO: 5145 - RNA, 17 nt, Artificial Sequence
  Synthetic
cgguggccgggcacccg

SEQ ID NO: 5146 - RNA, 17 nt, Artificial Sequence
  Synthetic
accuguccaccaccgcc

SEQ ID NO: 5147 - RNA, 17 nt, Artificial Sequence
  Synthetic
ccuguccaccaccgccc

SEQ ID NO: 5148 - RNA, 17 nt, Artificial Sequence
  Synthetic
cgguuccugcgaccucc

SEQ ID NO: 5149 - RNA, 17 nt, Artificial Sequence
  Synthetic
accuccccgaaucccac

SEQ ID NO: 5150 - RNA, 17 nt, Artificial Sequence
  Synthetic
ccccgaaucccaccuga

SEQ ID NO: 5151 - RNA, 17 nt, Artificial Sequence
  Synthetic
cugaacgagcuggcggc

SEQ ID NO: 5152 - RNA, 17 nt, Artificial Sequence
  Synthetic
ugaacgagcuggcggcc

SEQ ID NO: 5153 - RNA, 17 nt, Artificial Sequence
  Synthetic
ugcccacgcccgugguu

SEQ ID NO: 5154 - RNA, 17 nt, Artificial Sequence
  Synthetic
gcccacgcccgugguuc

SEQ ID NO: 5155 - RNA, 17 nt, Artificial Sequence
  Synthetic
gguucuggaauucgaca

SEQ ID NO: 5156 - RNA, 17 nt, Artificial Sequence
  Synthetic
ggaauucgacagcgaau

SEQ ID NO: 5157 - RNA, 17 nt, Artificial Sequence
  Synthetic
uggccuucaugacccuu

SEQ ID NO: 5158 - RNA, 17 nt, Artificial Sequence
  Synthetic
ugugaaacaguacggcc

SEQ ID NO: 5159 - RNA, 17 nt, Artificial Sequence
  Synthetic
cggccccgaguucguga

SEQ ID NO: 5160 - RNA, 17 nt, Artificial Sequence
  Synthetic
ucuugcuggccaagcug

SEQ ID NO: 5161 - RNA, 17 nt, Artificial Sequence
  Synthetic
acauuuacaaggucccc

SEQ ID NO: 5162 - RNA, 17 nt, Artificial Sequence
  Synthetic
uuacaaggucccccugg

SEQ ID NO: 5163 - RNA, 17 nt, Artificial Sequence
  Synthetic
uggacggguacggccgc

SEQ ID NO: 5164 - RNA, 17 nt, Artificial Sequence
  Synthetic
uacggccgcaugaacgg

SEQ ID NO: 5165 - RNA, 17 nt, Artificial Sequence
  Synthetic
acggccgcaugaacggc

SEQ ID NO: 5166 - RNA, 17 nt, Artificial Sequence
  Synthetic
cggggcguguuucgcgu

SEQ ID NO: 5167 - RNA, 17 nt, Artificial Sequence
  Synthetic
ggggcguguuucgcgug

SEQ ID NO: 5168 - RNA, 17 nt, Artificial Sequence
  Synthetic
gcgugugggacauaggc

SEQ ID NO: 5169 - RNA, 17 nt, Artificial Sequence
  Synthetic
uaggccagagccacuuc

SEQ ID NO: 5170 - RNA, 17 nt, Artificial Sequence
  Synthetic
agcgcagcaagauaaag

SEQ ID NO: 5171 - RNA, 17 nt, Artificial Sequence
  Synthetic
uaaaggugaacggcaug

SEQ ID NO: 5172 - RNA, 17 nt, Artificial Sequence
  Synthetic
ggugaacaucgacaugu

SEQ ID NO: 5173 - RNA, 17 nt, Artificial Sequence
  Synthetic
gugaacaucgacaugua

SEQ ID NO: 5174 - RNA, 17 nt, Artificial Sequence
  Synthetic
ccgacaagaucaagcuc

SEQ ID NO: 5175 - RNA, 17 nt, Artificial Sequence
  Synthetic
caagcucaacgccgugg

SEQ ID NO: 5176 - RNA, 17 nt, Artificial Sequence
  Synthetic
ccguggccgaagccguc

SEQ ID NO: 5177 - RNA, 17 nt, Artificial Sequence
  Synthetic
uggccgaagccguccug

SEQ ID NO: 5178 - RNA, 17 nt, Artificial Sequence
  Synthetic
aagccguccugaaggac

SEQ ID NO: 5179 - RNA, 17 nt, Artificial Sequence
  Synthetic
ccguccugaaggacaag

SEQ ID NO: 5180 - RNA, 17 nt, Artificial Sequence
  Synthetic
uccugaaggacaagaag

SEQ ID NO: 5181 - RNA, 17 nt, Artificial Sequence
  Synthetic
aggacaagaagaaggac

SEQ ID NO: 5182 - RNA, 17 nt, Artificial Sequence
  Synthetic
ccccgccuacuacgccg

SEQ ID NO: 5183 - RNA, 17 nt, Artificial Sequence
  Synthetic
cgccgggcccgcgcaac

SEQ ID NO: 5184 - RNA, 17 nt, Artificial Sequence
  Synthetic
gcaacgcggggugaucg

SEQ ID NO: 5185 - RNA, 17 nt, Artificial Sequence
  Synthetic
ucggcgaguacugcaua

SEQ ID NO: 5186 - RNA, 17 nt, Artificial Sequence
  Synthetic
uacaggauucccugcug

SEQ ID NO: 5187 - RNA, 17 nt, Artificial Sequence
  Synthetic
uuaaguuuuugccccau

SEQ ID NO: 5188 - RNA, 17 nt, Artificial Sequence
  Synthetic
uaaguuuuugccccauc

SEQ ID NO: 5189 - RNA, 17 nt, Artificial Sequence
  Synthetic
cggccgucgcgcgcuug

SEQ ID NO: 5190 - RNA, 17 nt, Artificial Sequence
  Synthetic
ugcugcgccuggccgac

SEQ ID NO: 5191 - RNA, 17 nt, Artificial Sequence
  Synthetic
ugcgccuggccgaccag

SEQ ID NO: 5192 - RNA, 17 nt, Artificial Sequence
  Synthetic
agaagggcuuuauucug

SEQ ID NO: 5193 - RNA, 17 nt, Artificial Sequence
  Synthetic
uuauucugccggacacc

SEQ ID NO: 5194 - RNA, 17 nt, Artificial Sequence
  Synthetic
uauucugccggacaccc

SEQ ID NO: 5195 - RNA, 17 nt, Artificial Sequence
  Synthetic
gacacccaggggcgauu

SEQ ID NO: 5196 - RNA, 17 nt, Artificial Sequence
  Synthetic
acacccaggggcgauuu

SEQ ID NO: 5197 - RNA, 17 nt, Artificial Sequence
  Synthetic
ggggcgauuuaggggcg

SEQ ID NO: 5198 - RNA, 17 nt, Artificial Sequence
  Synthetic
gggcgauuuaggggcgc

SEQ ID NO: 5199 - RNA, 17 nt, Artificial Sequence
  Synthetic
ggcgauuuaggggcgcc

SEQ ID NO: 5200 - RNA, 17 nt, Artificial Sequence
  Synthetic
gcgauuuaggggcgccg

SEQ ID NO: 5201 - RNA, 17 nt, Artificial Sequence
  Synthetic
cgauuuaggggcgccgg

SEQ ID NO: 5202 - RNA, 17 nt, Artificial Sequence
  Synthetic
gauuuaggggcgccggg

SEQ ID NO: 5203 - RNA, 17 nt, Artificial Sequence
  Synthetic
auuuaggggcgccgggg

SEQ ID NO: 5204 - RNA, 17 nt, Artificial Sequence
  Synthetic
aagcguccggccgcagc

SEQ ID NO: 5205 - RNA, 17 nt, Artificial Sequence
  Synthetic
agcguccggccgcagcc

SEQ ID NO: 5206 - RNA, 17 nt, Artificial Sequence
  Synthetic
gcguccggccgcagccc

SEQ ID NO: 5207 - RNA, 17 nt, Artificial Sequence
  Synthetic
guccggccgcagcccgg

SEQ ID NO: 5208 - RNA, 17 nt, Artificial Sequence
  Synthetic
ggccgcagcccgggagg

SEQ ID NO: 5209 - RNA, 17 nt, Artificial Sequence
  Synthetic
ccgcagcccgggaggac

SEQ ID NO: 5210 - RNA, 17 nt, Artificial Sequence
  Synthetic
ggaggacgaggagcggc

SEQ ID NO: 5211 - RNA, 17 nt, Artificial Sequence
  Synthetic
aggacgaggagcggcca

SEQ ID NO: 5212 - RNA, 17 nt, Artificial Sequence
  Synthetic
acgaggagcggccagag

SEQ ID NO: 5213 - RNA, 17 nt, Artificial Sequence
  Synthetic
aggagcggccagaggag

SEQ ID NO: 5214 - RNA, 17 nt, Artificial Sequence
  Synthetic
ggccagaggaggagggg

SEQ ID NO: 5215 - RNA, 17 nt, Artificial Sequence
  Synthetic
agaggaggagggggagg

SEQ ID NO: 5216 - RNA, 17 nt, Artificial Sequence
  Synthetic
aggaggagggggaggac

SEQ ID NO: 5217 - RNA, 17 nt, Artificial Sequence
  Synthetic
ggagggggaggacgagg

SEQ ID NO: 5218 - RNA, 17 nt, Artificial Sequence
  Synthetic
ggaggacgaggacgaac

SEQ ID NO: 5219 - RNA, 17 nt, Artificial Sequence
  Synthetic
aggacgaggacgaacgc

SEQ ID NO: 5220 - RNA, 17 nt, Artificial Sequence
  Synthetic
acgaggacgaacgcgag

SEQ ID NO: 5221 - RNA, 17 nt, Artificial Sequence
  Synthetic
ggacgaacgcgaggagg

SEQ ID NO: 5222 - RNA, 17 nt, Artificial Sequence
  Synthetic
acgcgaggagggcgggg

SEQ ID NO: 5223 - RNA, 17 nt, Artificial Sequence
  Synthetic
gaggagggcgggggcga

SEQ ID NO: 5224 - RNA, 17 nt, Artificial Sequence
  Synthetic
gcgggggcgagcgggag

SEQ ID NO: 5225 - RNA, 17 nt, Artificial Sequence
  Synthetic
ggggcgagcgggagccg

SEQ ID NO: 5226 - RNA, 17 nt, Artificial Sequence
  Synthetic
cgggagccggagggcgc

SEQ ID NO: 5227 - RNA, 17 nt, Artificial Sequence
  Synthetic
agaccgccggcaggcac

SEQ ID NO: 5228 - RNA, 17 nt, Artificial Sequence
  Synthetic
gcaggcacgugggguac

SEQ ID NO: 5229 - RNA, 17 nt, Artificial Sequence
  Synthetic
caggcacgugggguacc

SEQ ID NO: 5230 - RNA, 17 nt, Artificial Sequence
  Synthetic
aggcacgugggguacca

SEQ ID NO: 5231 - RNA, 17 nt, Artificial Sequence
  Synthetic
gugggguaccagggggc

SEQ ID NO: 5232 - RNA, 17 nt, Artificial Sequence
  Synthetic
gguccuugaccccacuu

SEQ ID NO: 5233 - RNA, 17 nt, Artificial Sequence
  Synthetic
ccacuuccggguuucac

SEQ ID NO: 5234 - RNA, 17 nt, Artificial Sequence
  Synthetic
gcuucagcacgcucucc

SEQ ID NO: 5235 - RNA, 17 nt, Artificial Sequence
  Synthetic
uucagcacgcucucccu

SEQ ID NO: 5236 - RNA, 17 nt, Artificial Sequence
  Synthetic
ccgacgcaguggcgcac

SEQ ID NO: 5237 - RNA, 17 nt, Artificial Sequence
  Synthetic
cgacgcaguggcgcacc

SEQ ID NO: 5238 - RNA, 17 nt, Artificial Sequence
  Synthetic
caguggcgcaccuggag

SEQ ID NO: 5239 - RNA, 17 nt, Artificial Sequence
  Synthetic
cgcaccuggaggcgggc

SEQ ID NO: 5240 - RNA, 17 nt, Artificial Sequence
  Synthetic
aggcgggcaaggacuac

SEQ ID NO: 5241 - RNA, 17 nt, Artificial Sequence
  Synthetic
ggcgggcaaggacuacc

SEQ ID NO: 5242 - RNA, 17 nt, Artificial Sequence
  Synthetic
caaggacuaccuggaga

SEQ ID NO: 5243 - RNA, 17 nt, Artificial Sequence
  Synthetic
acuaccuggagaucgag

SEQ ID NO: 5244 - RNA, 17 nt, Artificial Sequence
  Synthetic
cuaccuggagaucgagg

SEQ ID NO: 5245 - RNA, 17 nt, Artificial Sequence
  Synthetic
uaccuggagaucgaggu

SEQ ID NO: 5246 - RNA, 17 nt, Artificial Sequence
  Synthetic
accuggagaucgaggug

SEQ ID NO: 5247 - RNA, 17 nt, Artificial Sequence
  Synthetic
ccuggagaucgaggugg

SEQ ID NO: 5248 - RNA, 17 nt, Artificial Sequence
  Synthetic
uucgucaaggcucacgu

SEQ ID NO: 5249 - RNA, 17 nt, Artificial Sequence
  Synthetic
cgucaaggcucacgugc

SEQ ID NO: 5250 - RNA, 17 nt, Artificial Sequence
  Synthetic
ucaaggcucacgugcga

SEQ ID NO: 5251 - RNA, 17 nt, Artificial Sequence
  Synthetic
cuccucagcauccuccu

SEQ ID NO: 5252 - RNA, 17 nt, Artificial Sequence
  Synthetic
uccucagcauccuccug

SEQ ID NO: 5253 - RNA, 17 nt, Artificial Sequence
  Synthetic
cgggacuggcucgccau

SEQ ID NO: 5254 - RNA, 17 nt, Artificial Sequence
  Synthetic
cgaaagcagauccgcuc

SEQ ID NO: 5255 - RNA, 17 nt, Artificial Sequence
  Synthetic
uccgcucgcggauuccc

SEQ ID NO: 5256 - RNA, 17 nt, Artificial Sequence
  Synthetic
gauuccccagagcagcc

SEQ ID NO: 5257 - RNA, 17 nt, Artificial Sequence
  Synthetic
uuccccagagcagcccc

SEQ ID NO: 5258 - RNA, 17 nt, Artificial Sequence
  Synthetic
uccccagagcagccccg

SEQ ID NO: 5259 - RNA, 17 nt, Artificial Sequence
  Synthetic
ccgaggaggccgugcuc

SEQ ID NO: 5260 - RNA, 17 nt, Artificial Sequence
  Synthetic
cguguguaacucggugu

SEQ ID NO: 5261 - RNA, 17 nt, Artificial Sequence
  Synthetic
acucgguguacggguuc

SEQ ID NO: 5262 - RNA, 17 nt, Artificial Sequence
  Synthetic
cucgguguacggguuca

SEQ ID NO: 5263 - RNA, 17 nt, Artificial Sequence
  Synthetic
ucgguguacggguucac

SEQ ID NO: 5264 - RNA, 17 nt, Artificial Sequence
  Synthetic
guucacgggagugcagc

SEQ ID NO: 5265 - RNA, 17 nt, Artificial Sequence
  Synthetic
ggugacgaccaucggcc

SEQ ID NO: 5266 - RNA, 17 nt, Artificial Sequence
  Synthetic
gaugcugcucgcgaccc

SEQ ID NO: 5267 - RNA, 17 nt, Artificial Sequence
  Synthetic
gaguacguccacgcgcg

SEQ ID NO: 5268 - RNA, 17 nt, Artificial Sequence
  Synthetic
cgcgcgcugggcggccu

SEQ ID NO: 5269 - RNA, 17 nt, Artificial Sequence
  Synthetic
agcuccuggccgauuuc

SEQ ID NO: 5270 - RNA, 17 nt, Artificial Sequence
  Synthetic
gcuccuggccgauuucc

SEQ ID NO: 5271 - RNA, 17 nt, Artificial Sequence
  Synthetic
ggccgacaugcgcgccc

SEQ ID NO: 5272 - RNA, 17 nt, Artificial Sequence
  Synthetic
uuccaugcgcaucaucu

SEQ ID NO: 5273 - RNA, 17 nt, Artificial Sequence
  Synthetic
uccaugcgcaucaucua

SEQ ID NO: 5274 - RNA, 17 nt, Artificial Sequence
  Synthetic
ccaugcgcaucaucuac

SEQ ID NO: 5275 - RNA, 17 nt, Artificial Sequence
  Synthetic
gcaucaucuacggggac

SEQ ID NO: 5276 - RNA, 17 nt, Artificial Sequence
  Synthetic
ccgcggccucacggccg

SEQ ID NO: 5277 - RNA, 17 nt, Artificial Sequence
  Synthetic
ccgccgggcugacggcc

SEQ ID NO: 5278 - RNA, 17 nt, Artificial Sequence
  Synthetic
ccgugggcgacaagaug

SEQ ID NO: 5279 - RNA, 17 nt, Artificial Sequence
  Synthetic
ucugccccccaucaaac

SEQ ID NO: 5280 - RNA, 17 nt, Artificial Sequence
  Synthetic
ccccaucaaacucgagu

SEQ ID NO: 5281 - RNA, 17 nt, Artificial Sequence
  Synthetic
agcugcugcugaucgcc

SEQ ID NO: 5282 - RNA, 17 nt, Artificial Sequence
  Synthetic
guacaucggcgucaucu

SEQ ID NO: 5283 - RNA, 17 nt, Artificial Sequence
  Synthetic
uacaucggcgucaucua

SEQ ID NO: 5284 - RNA, 17 nt, Artificial Sequence
  Synthetic
acaucggcgucaucuac

SEQ ID NO: 5285 - RNA, 17 nt, Artificial Sequence
  Synthetic
gggguaagaugcucauc

SEQ ID NO: 5286 - RNA, 17 nt, Artificial Sequence
  Synthetic
agaugcucaucaagggc

SEQ ID NO: 5287 - RNA, 17 nt, Artificial Sequence
  Synthetic
uuuaucaaccgcaccuc

SEQ ID NO: 5288 - RNA, 17 nt, Artificial Sequence
  Synthetic
uuacgacgauaccgucu

SEQ ID NO: 5289 - RNA, 17 nt, Artificial Sequence
  Synthetic
uacgacgauaccgucuc

SEQ ID NO: 5290 - RNA, 17 nt, Artificial Sequence
  Synthetic
agcggccgccgcguuag

SEQ ID NO: 5291 - RNA, 17 nt, Artificial Sequence
  Synthetic
cguuagccgagcgcccc

SEQ ID NO: 5292 - RNA, 17 nt, Artificial Sequence
  Synthetic
guuagccgagcgccccg

SEQ ID NO: 5293 - RNA, 17 nt, Artificial Sequence
  Synthetic
uagccgagcgccccgcg

SEQ ID NO: 5294 - RNA, 17 nt, Artificial Sequence
  Synthetic
gcuggcgcgaccccugc

SEQ ID NO: 5295 - RNA, 17 nt, Artificial Sequence
  Synthetic
uggcgcgaccccugccc

SEQ ID NO: 5296 - RNA, 17 nt, Artificial Sequence
  Synthetic
ggcgcgaccccugcccg

SEQ ID NO: 5297 - RNA, 17 nt, Artificial Sequence
  Synthetic
cgagggacugcaggcgu

SEQ ID NO: 5298 - RNA, 17 nt, Artificial Sequence
  Synthetic
gagggacugcaggcguu

SEQ ID NO: 5299 - RNA, 17 nt, Artificial Sequence
  Synthetic
aucggcgcaucaccgac

SEQ ID NO: 5300 - RNA, 17 nt, Artificial Sequence
  Synthetic
ucggcgcaucaccgacc

SEQ ID NO: 5301 - RNA, 17 nt, Artificial Sequence
  Synthetic
ggcgcaucaccgacccg

SEQ ID NO: 5302 - RNA, 17 nt, Artificial Sequence
  Synthetic
cgcaucaccgacccgga

SEQ ID NO: 5303 - RNA, 17 nt, Artificial Sequence
  Synthetic
gcaucaccgacccggag

SEQ ID NO: 5304 - RNA, 17 nt, Artificial Sequence
  Synthetic
acccggagagggacauc

SEQ ID NO: 5305 - RNA, 17 nt, Artificial Sequence
  Synthetic
ggacuuuguccucaccg

SEQ ID NO: 5306 - RNA, 17 nt, Artificial Sequence
  Synthetic
uuguccucaccgccgaa

SEQ ID NO: 5307 - RNA, 17 nt, Artificial Sequence
  Synthetic
cgcaggucccguccauc

SEQ ID NO: 5308 - RNA, 17 nt, Artificial Sequence
  Synthetic
gucccguccaucaagga

SEQ ID NO: 5309 - RNA, 17 nt, Artificial Sequence
  Synthetic
gaucguggcccagaccc

SEQ ID NO: 5310 - RNA, 17 nt, Artificial Sequence
  Synthetic
ggcccagacccgcgagg

SEQ ID NO: 5311 - RNA, 17 nt, Artificial Sequence
  Synthetic
cccagacccgcgaggua

SEQ ID NO: 5312 - RNA, 17 nt, Artificial Sequence
  Synthetic
ccagacccgcgagguag

SEQ ID NO: 5313 - RNA, 17 nt, Artificial Sequence
  Synthetic
gcggcuggccgcccucc

SEQ ID NO: 5314 - RNA, 17 nt, Artificial Sequence
  Synthetic
gcuagacgccgccgccc

SEQ ID NO: 5315 - RNA, 17 nt, Artificial Sequence
  Synthetic
cuagacgccgccgcccc

SEQ ID NO: 5316 - RNA, 17 nt, Artificial Sequence
  Synthetic
uagacgccgccgcccca

SEQ ID NO: 5317 - RNA, 17 nt, Artificial Sequence
  Synthetic
cgccgccgccccagggg

SEQ ID NO: 5318 - RNA, 17 nt, Artificial Sequence
  Synthetic
uccccggccaagcgccc

SEQ ID NO: 5319 - RNA, 17 nt, Artificial Sequence
  Synthetic
cgucgccugccgacccc

SEQ ID NO: 5320 - RNA, 17 nt, Artificial Sequence
  Synthetic
gucgccugccgaccccc

SEQ ID NO: 5321 - RNA, 17 nt, Artificial Sequence
  Synthetic
ucgccugccgacccccc

SEQ ID NO: 5322 - RNA, 17 nt, Artificial Sequence
  Synthetic
ccgcaagcugcuggugu

SEQ ID NO: 5323 - RNA, 17 nt, Artificial Sequence
  Synthetic
gcugguguccgagcugg

SEQ ID NO: 5324 - RNA, 17 nt, Artificial Sequence
  Synthetic
ugguguccgagcuggcc

SEQ ID NO: 5325 - RNA, 17 nt, Artificial Sequence
  Synthetic
uugcccacggcgucgcc

SEQ ID NO: 5326 - RNA, 17 nt, Artificial Sequence
  Synthetic
acggcgucgcccugaac

SEQ ID NO: 5327 - RNA, 17 nt, Artificial Sequence
  Synthetic
auuacuucucccaccug

SEQ ID NO: 5328 - RNA, 17 nt, Artificial Sequence
  Synthetic
uuacuucucccaccugu

SEQ ID NO: 5329 - RNA, 17 nt, Artificial Sequence
  Synthetic
uacuucucccaccuguu

SEQ ID NO: 5330 - RNA, 17 nt, Artificial Sequence
  Synthetic
gacauucaaggcccugu

SEQ ID NO: 5331 - RNA, 17 nt, Artificial Sequence
  Synthetic
acauucaaggcccuguu

SEQ ID NO: 5332 - RNA, 17 nt, Artificial Sequence
  Synthetic
cauucaaggcccuguuu

SEQ ID NO: 5333 - RNA, 17 nt, Artificial Sequence
  Synthetic
gaauaacgccaagauca

SEQ ID NO: 5334 - RNA, 17 nt, Artificial Sequence
  Synthetic
auaacgccaagaucacc

SEQ ID NO: 5335 - RNA, 17 nt, Artificial Sequence
  Synthetic
guuaaaaagguuuauuc

SEQ ID NO: 5336 - RNA, 17 nt, Artificial Sequence
  Synthetic
ccgaaguguggcacccc

SEQ ID NO: 5337 - RNA, 17 nt, Artificial Sequence
  Synthetic
gacguggccgcgcggcu

SEQ ID NO: 5338 - RNA, 17 nt, Artificial Sequence
  Synthetic
cgcgcggcuccggaccg

SEQ ID NO: 5339 - RNA, 17 nt, Artificial Sequence
  Synthetic
gcuccggaccgcagggu

SEQ ID NO: 5340 - RNA, 17 nt, Artificial Sequence
  Synthetic
cuccggaccgcaggguu

SEQ ID NO: 5341 - RNA, 17 nt, Artificial Sequence
  Synthetic
ccgcaggguucggggcg

SEQ ID NO: 5342 - RNA, 17 nt, Artificial Sequence
  Synthetic
ugggugccggcgcuacg

SEQ ID NO: 5343 - RNA, 17 nt, Artificial Sequence
  Synthetic
gggugccggcgcuacgg

SEQ ID NO: 5344 - RNA, 17 nt, Artificial Sequence
  Synthetic
gugccggcgcuacggcg

SEQ ID NO: 5345 - RNA, 17 nt, Artificial Sequence
  Synthetic
ugccggcgcuacggcgg

SEQ ID NO: 5346 - RNA, 17 nt, Artificial Sequence
  Synthetic
acggcggaggaaacucg

SEQ ID NO: 5347 - RNA, 17 nt, Artificial Sequence
  Synthetic
acucgucgaauguugca

SEQ ID NO: 5348 - RNA, 20 nt, Artificial Sequence
  Synthetic
aaggcucuaugcaacauucg

SEQ ID NO: 5349 - RNA, 20 nt, Artificial Sequence
  Synthetic
uagcgccggcacccaccgcc

SEQ ID NO: 5350 - RNA, 20 nt, Artificial Sequence
  Synthetic
accgccccgaacccugcggu

SEQ ID NO: 5351 - RNA, 20 nt, Artificial Sequence
  Synthetic
ccgccccgaacccugcgguc

SEQ ID NO: 5352 - RNA, 20 nt, Artificial Sequence
  Synthetic
gagccgcgcggccacgucgu

SEQ ID NO: 5353 - RNA, 20 nt, Artificial Sequence
  Synthetic
agccgcgcggccacgucguc

SEQ ID NO: 5354 - RNA, 20 nt, Artificial Sequence
  Synthetic
gccgcgcggccacgucgucc

SEQ ID NO: 5355 - RNA, 20 nt, Artificial Sequence
  Synthetic
ccgcgcggccacgucguccg

SEQ ID NO: 5356 - RNA, 20 nt, Artificial Sequence
  Synthetic
cguccggggggugccacacu

SEQ ID NO: 5357 - RNA, 20 nt, Artificial Sequence
  Synthetic
guccggggggugccacacuu

SEQ ID NO: 5358 - RNA, 20 nt, Artificial Sequence
  Synthetic
uccggggggugccacacuuc

SEQ ID NO: 5359 - RNA, 20 nt, Artificial Sequence
  Synthetic
aucuuggcguuauucccaaa

SEQ ID NO: 5360 - RNA, 20 nt, Artificial Sequence
  Synthetic
cguuauucccaaacagggcc

SEQ ID NO: 5361 - RNA, 20 nt, Artificial Sequence
  Synthetic
acgcacgccgcccccaacag

SEQ ID NO: 5362 - RNA, 20 nt, Artificial Sequence
  Synthetic
gcacgccgcccccaacaggu

SEQ ID NO: 5363 - RNA, 20 nt, Artificial Sequence
  Synthetic
acgccgcccccaacaggugg

SEQ ID NO: 5364 - RNA, 20 nt, Artificial Sequence
  Synthetic
gagaaguaauaguccguguu

SEQ ID NO: 5365 - RNA, 20 nt, Artificial Sequence
  Synthetic
uccguguucagggcgacgcc

SEQ ID NO: 5366 - RNA, 20 nt, Artificial Sequence
  Synthetic
cgccgugggcaauggcguau

SEQ ID NO: 5367 - RNA, 20 nt, Artificial Sequence
  Synthetic
gccgugggcaauggcguaug

SEQ ID NO: 5368 - RNA, 20 nt, Artificial Sequence
  Synthetic
augcgggauccucggccagc

SEQ ID NO: 5369 - RNA, 20 nt, Artificial Sequence
  Synthetic
agcucggacaccagcagcuu

SEQ ID NO: 5370 - RNA, 20 nt, Artificial Sequence
  Synthetic
gcucggacaccagcagcuug

SEQ ID NO: 5371 - RNA, 20 nt, Artificial Sequence
  Synthetic
acaccagcagcuugcggggc

SEQ ID NO: 5372 - RNA, 20 nt, Artificial Sequence
  Synthetic
gcggggcuuggacgcgccuc

SEQ ID NO: 5373 - RNA, 20 nt, Artificial Sequence
  Synthetic
cggggcuuggacgcgccucc

SEQ ID NO: 5374 - RNA, 20 nt, Artificial Sequence
  Synthetic
ggggcuuggacgcgccuccc

SEQ ID NO: 5375 - RNA, 20 nt, Artificial Sequence
  Synthetic
gggcuuggacgcgccucccg

SEQ ID NO: 5376 - RNA, 20 nt, Artificial Sequence
  Synthetic
ucggcaggcgacggcgucuc

SEQ ID NO: 5377 - RNA, 20 nt, Artificial Sequence
  Synthetic
cggcaggcgacggcgucucc

SEQ ID NO: 5378 - RNA, 20 nt, Artificial Sequence
  Synthetic
ggcaggcgacggcgucuccc

SEQ ID NO: 5379 - RNA, 20 nt, Artificial Sequence
  Synthetic
cgucucccgggggcgcuugg

SEQ ID NO: 5380 - RNA, 20 nt, Artificial Sequence
  Synthetic
gucucccgggggcgcuuggc

SEQ ID NO: 5381 - RNA, 20 nt, Artificial Sequence
  Synthetic
ucucccgggggcgcuuggcc

SEQ ID NO: 5382 - RNA, 20 nt, Artificial Sequence
  Synthetic
cucccgggggcgcuuggccg

SEQ ID NO: 5383 - RNA, 20 nt, Artificial Sequence
  Synthetic
cccgggggcgcuuggccggg

SEQ ID NO: 5384 - RNA, 20 nt, Artificial Sequence
  Synthetic
gggcgcuuggccggggaggg

SEQ ID NO: 5385 - RNA, 20 nt, Artificial Sequence
  Synthetic
uggccggggagggcagggcc

SEQ ID NO: 5386 - RNA, 20 nt, Artificial Sequence
  Synthetic
agggcagggccgcggggggg

SEQ ID NO: 5387 - RNA, 20 nt, Artificial Sequence
  Synthetic
ggggggggcgggcucguccc

SEQ ID NO: 5388 - RNA, 20 nt, Artificial Sequence
  Synthetic
gggggggcgggcucgucccc

SEQ ID NO: 5389 - RNA, 20 nt, Artificial Sequence
  Synthetic
ggggcggcggcgucuagcuc

SEQ ID NO: 5390 - RNA, 20 nt, Artificial Sequence
  Synthetic
gggcggcggcgucuagcucg

SEQ ID NO: 5391 - RNA, 20 nt, Artificial Sequence
  Synthetic
gcggcggcgucuagcucgcg

SEQ ID NO: 5392 - RNA, 20 nt, Artificial Sequence
  Synthetic
gcgaccgucuccucuaccuc

SEQ ID NO: 5393 - RNA, 20 nt, Artificial Sequence
  Synthetic
gucuccucuaccucgcgggu

SEQ ID NO: 5394 - RNA, 20 nt, Artificial Sequence
  Synthetic
ggucugggccacgaucacgu

SEQ ID NO: 5395 - RNA, 20 nt, Artificial Sequence
  Synthetic
gucugggccacgaucacgua

SEQ ID NO: 5396 - RNA, 20 nt, Artificial Sequence
  Synthetic
cguacgggauccgguccuug

SEQ ID NO: 5397 - RNA, 20 nt, Artificial Sequence
  Synthetic
cgggauccgguccuugaugg

SEQ ID NO: 5398 - RNA, 20 nt, Artificial Sequence
  Synthetic
gggauccgguccuugaugga

SEQ ID NO: 5399 - RNA, 20 nt, Artificial Sequence
  Synthetic
auggacgggaccugcgcgcg

SEQ ID NO: 5400 - RNA, 20 nt, Artificial Sequence
  Synthetic
ggaccugcgcgcggcgggcc

SEQ ID NO: 5401 - RNA, 20 nt, Artificial Sequence
  Synthetic
agcuuguaauacaccgucag

SEQ ID NO: 5402 - RNA, 20 nt, Artificial Sequence
  Synthetic
gcgcuuguugguguacgcgc

SEQ ID NO: 5403 - RNA, 20 nt, Artificial Sequence
  Synthetic
ggugucugcucaguucggcg

SEQ ID NO: 5404 - RNA, 20 nt, Artificial Sequence
  Synthetic
ugucugcucaguucggcggu

SEQ ID NO: 5405 - RNA, 20 nt, Artificial Sequence
  Synthetic
ucggcggugaggacaaaguc

SEQ ID NO: 5406 - RNA, 20 nt, Artificial Sequence
  Synthetic
aaaguccuggaugucccucu

SEQ ID NO: 5407 - RNA, 20 nt, Artificial Sequence
  Synthetic
uccgggucggugaugcgccg

SEQ ID NO: 5408 - RNA, 20 nt, Artificial Sequence
  Synthetic
ugaugcgccgaugggcgucu

SEQ ID NO: 5409 - RNA, 20 nt, Artificial Sequence
  Synthetic
augcgccgaugggcgucuac

SEQ ID NO: 5410 - RNA, 20 nt, Artificial Sequence
  Synthetic
gggcgucuacgaggacggcc

SEQ ID NO: 5411 - RNA, 20 nt, Artificial Sequence
  Synthetic
ccccgaacgccugcaguccc

SEQ ID NO: 5412 - RNA, 20 nt, Artificial Sequence
  Synthetic
aacgccugcagucccucggg

SEQ ID NO: 5413 - RNA, 20 nt, Artificial Sequence
  Synthetic
acgccugcagucccucgggc

SEQ ID NO: 5414 - RNA, 20 nt, Artificial Sequence
  Synthetic
gucgcgccagccacuccucc

SEQ ID NO: 5415 - RNA, 20 nt, Artificial Sequence
  Synthetic
ucgcgccagccacuccuccg

SEQ ID NO: 5416 - RNA, 20 nt, Artificial Sequence
  Synthetic
cggcuaacgcggcggccgcu

SEQ ID NO: 5417 - RNA, 20 nt, Artificial Sequence
  Synthetic
ggcuaacgcggcggccgcuc

SEQ ID NO: 5418 - RNA, 20 nt, Artificial Sequence
  Synthetic
ucguaaaacagcaggucgac

SEQ ID NO: 5419 - RNA, 20 nt, Artificial Sequence
  Synthetic
acagcaggucgaccagggcc

SEQ ID NO: 5420 - RNA, 20 nt, Artificial Sequence
  Synthetic
cagcaggucgaccagggccc

SEQ ID NO: 5421 - RNA, 20 nt, Artificial Sequence
  Synthetic
gcaccagauccacgcccuug

SEQ ID NO: 5422 - RNA, 20 nt, Artificial Sequence
  Synthetic
uggcgaucagcagcagcuug

SEQ ID NO: 5423 - RNA, 20 nt, Artificial Sequence
  Synthetic
uggugaacgucuuuucgcac

SEQ ID NO: 5424 - RNA, 20 nt, Artificial Sequence
  Synthetic
ucuuuucgcacucgaguuug

SEQ ID NO: 5425 - RNA, 20 nt, Artificial Sequence
  Synthetic
cuuuucgcacucgaguuuga

SEQ ID NO: 5426 - RNA, 20 nt, Artificial Sequence
  Synthetic
uuuucgcacucgaguuugau

SEQ ID NO: 5427 - RNA, 20 nt, Artificial Sequence
  Synthetic
uuucgcacucgaguuugaug

SEQ ID NO: 5428 - RNA, 20 nt, Artificial Sequence
  Synthetic
cacucgaguuugaugggggg

SEQ ID NO: 5429 - RNA, 20 nt, Artificial Sequence
  Synthetic
ggggggcagaaacagcgcgc

SEQ ID NO: 5430 - RNA, 20 nt, Artificial Sequence
  Synthetic
cggccgucagcccggcggcc

SEQ ID NO: 5431 - RNA, 20 nt, Artificial Sequence
  Synthetic
ggccgcggcacagcacaaag

SEQ ID NO: 5432 - RNA, 20 nt, Artificial Sequence
  Synthetic
uguccccguagaugaugcgc

SEQ ID NO: 5433 - RNA, 20 nt, Artificial Sequence
  Synthetic
guccccguagaugaugcgca

SEQ ID NO: 5434 - RNA, 20 nt, Artificial Sequence
  Synthetic
cguagaugaugcgcauggaa

SEQ ID NO: 5435 - RNA, 20 nt, Artificial Sequence
  Synthetic
ugaugcgcauggaauagggc

SEQ ID NO: 5436 - RNA, 20 nt, Artificial Sequence
  Synthetic
gaugcgcauggaauagggcc

SEQ ID NO: 5437 - RNA, 20 nt, Artificial Sequence
  Synthetic
augcgcauggaauagggccc

SEQ ID NO: 5438 - RNA, 20 nt, Artificial Sequence
  Synthetic
ggcgcgcaugucggccgccu

SEQ ID NO: 5439 - RNA, 20 nt, Artificial Sequence
  Synthetic
gcgcgcaugucggccgccuc

SEQ ID NO: 5440 - RNA, 20 nt, Artificial Sequence
  Synthetic
cgcgcaugucggccgccucc

SEQ ID NO: 5441 - RNA, 20 nt, Artificial Sequence
  Synthetic
gccgccuccgggaaaucggc

SEQ ID NO: 5442 - RNA, 20 nt, Artificial Sequence
  Synthetic
ccgccuccgggaaaucggcc

SEQ ID NO: 5443 - RNA, 20 nt, Artificial Sequence
  Synthetic
ggaaaucggccaggagcugu

SEQ ID NO: 5444 - RNA, 20 nt, Artificial Sequence
  Synthetic
ucgaaggccgcccagcgcgc

SEQ ID NO: 5445 - RNA, 20 nt, Artificial Sequence
  Synthetic
cagcgcgcguggacguacuc

SEQ ID NO: 5446 - RNA, 20 nt, Artificial Sequence
  Synthetic
cguggacguacucgcggguc

SEQ ID NO: 5447 - RNA, 20 nt, Artificial Sequence
  Synthetic
gcggcaacgugcaggcacgg

SEQ ID NO: 5448 - RNA, 20 nt, Artificial Sequence
  Synthetic
cggcaacgugcaggcacggc

SEQ ID NO: 5449 - RNA, 20 nt, Artificial Sequence
  Synthetic
ggaguccgugcugcacuccc

SEQ ID NO: 5450 - RNA, 20 nt, Artificial Sequence
  Synthetic
cacucccgugaacccguaca

SEQ ID NO: 5451 - RNA, 20 nt, Artificial Sequence
  Synthetic
auggcggccugcugcuuguc

SEQ ID NO: 5452 - RNA, 20 nt, Artificial Sequence
  Synthetic
uggcggccugcugcuugucc

SEQ ID NO: 5453 - RNA, 20 nt, Artificial Sequence
  Synthetic
uguccaggagcacggccucc

SEQ ID NO: 5454 - RNA, 20 nt, Artificial Sequence
  Synthetic
guccaggagcacggccuccu

SEQ ID NO: 5455 - RNA, 20 nt, Artificial Sequence
  Synthetic
acggccuccucggggcugcu

SEQ ID NO: 5456 - RNA, 20 nt, Artificial Sequence
  Synthetic
cggccuccucggggcugcuc

SEQ ID NO: 5457 - RNA, 20 nt, Artificial Sequence
  Synthetic
ggccuccucggggcugcucu

SEQ ID NO: 5458 - RNA, 20 nt, Artificial Sequence
  Synthetic
gccuccucggggcugcucug

SEQ ID NO: 5459 - RNA, 20 nt, Artificial Sequence
  Synthetic
ggggcugcucuggggaaucc

SEQ ID NO: 5460 - RNA, 20 nt, Artificial Sequence
  Synthetic
cugcucuggggaauccgcga

SEQ ID NO: 5461 - RNA, 20 nt, Artificial Sequence
  Synthetic
agcggaucugcuuucgcaug

SEQ ID NO: 5462 - RNA, 20 nt, Artificial Sequence
  Synthetic
cgcauggcgagccagucccg

SEQ ID NO: 5463 - RNA, 20 nt, Artificial Sequence
  Synthetic
gcauggcgagccagucccgc

SEQ ID NO: 5464 - RNA, 20 nt, Artificial Sequence
  Synthetic
auggcgagccagucccgcag

SEQ ID NO: 5465 - RNA, 20 nt, Artificial Sequence
  Synthetic
gccagucccgcaggaggaug

SEQ ID NO: 5466 - RNA, 20 nt, Artificial Sequence
  Synthetic
cagucccgcaggaggaugcu

SEQ ID NO: 5467 - RNA, 20 nt, Artificial Sequence
  Synthetic
agucccgcaggaggaugcug

SEQ ID NO: 5468 - RNA, 20 nt, Artificial Sequence
  Synthetic
cugaggaggcucucucgcac

SEQ ID NO: 5469 - RNA, 20 nt, Artificial Sequence
  Synthetic
ucucucgcacgugagccuug

SEQ ID NO: 5470 - RNA, 20 nt, Artificial Sequence
  Synthetic
cucgcacgugagccuugacg

SEQ ID NO: 5471 - RNA, 20 nt, Artificial Sequence
  Synthetic
ugcgccacugcgucggcccu

SEQ ID NO: 5472 - RNA, 20 nt, Artificial Sequence
  Synthetic
gcgccacugcgucggcccuc

SEQ ID NO: 5473 - RNA, 20 nt, Artificial Sequence
  Synthetic
cgccacugcgucggcccuca

SEQ ID NO: 5474 - RNA, 20 nt, Artificial Sequence
  Synthetic
ccacugcgucggcccucagg

SEQ ID NO: 5475 - RNA, 20 nt, Artificial Sequence
  Synthetic
cggcccucagggagagcgug

SEQ ID NO: 5476 - RNA, 20 nt, Artificial Sequence
  Synthetic
agcgugcugaagcacagguu

SEQ ID NO: 5477 - RNA, 20 nt, Artificial Sequence
  Synthetic
cugaagcacagguugugggc

SEQ ID NO: 5478 - RNA, 20 nt, Artificial Sequence
  Synthetic
gguugugggccuggaugaug

SEQ ID NO: 5479 - RNA, 20 nt, Artificial Sequence
  Synthetic
guugugggccuggaugaugc

SEQ ID NO: 5480 - RNA, 20 nt, Artificial Sequence
  Synthetic
ugggguacaggcuggcaaag

SEQ ID NO: 5481 - RNA, 20 nt, Artificial Sequence
  Synthetic
uggcaaagucgaacaccacc

SEQ ID NO: 5482 - RNA, 20 nt, Artificial Sequence
  Synthetic
ggcaaagucgaacaccacca

SEQ ID NO: 5483 - RNA, 20 nt, Artificial Sequence
  Synthetic
aacaccaccacgggguucac

SEQ ID NO: 5484 - RNA, 20 nt, Artificial Sequence
  Synthetic
ccacgggguucacgugaaac

SEQ ID NO: 5485 - RNA, 20 nt, Artificial Sequence
  Synthetic
cacgggguucacgugaaacc

SEQ ID NO: 5486 - RNA, 20 nt, Artificial Sequence
  Synthetic
gguucacgugaaacccggaa

SEQ ID NO: 5487 - RNA, 20 nt, Artificial Sequence
  Synthetic
guucacgugaaacccggaag

SEQ ID NO: 5488 - RNA, 20 nt, Artificial Sequence
  Synthetic
ugaaacccggaagugggguc

SEQ ID NO: 5489 - RNA, 20 nt, Artificial Sequence
  Synthetic
ucuggccgcuccucguccuc

SEQ ID NO: 5490 - RNA, 20 nt, Artificial Sequence
  Synthetic
cucguccucccgggcugcgg

SEQ ID NO: 5491 - RNA, 20 nt, Artificial Sequence
  Synthetic
cccgggcugcggccggacgc

SEQ ID NO: 5492 - RNA, 20 nt, Artificial Sequence
  Synthetic
ccggcgccccuaaaucgccc

SEQ ID NO: 5493 - RNA, 20 nt, Artificial Sequence
  Synthetic
aaucgccccuggguguccgg

SEQ ID NO: 5494 - RNA, 20 nt, Artificial Sequence
  Synthetic
cgcagcaggcacguaaagac

SEQ ID NO: 5495 - RNA, 20 nt, Artificial Sequence
  Synthetic
ugcuggccgucguagauggu

SEQ ID NO: 5496 - RNA, 20 nt, Artificial Sequence
  Synthetic
acccgccaagcgcgcgacgg

SEQ ID NO: 5497 - RNA, 20 nt, Artificial Sequence
  Synthetic
ccgccaagcgcgcgacggcc

SEQ ID NO: 5498 - RNA, 20 nt, Artificial Sequence
  Synthetic
gcgacggccgagagcuccag

SEQ ID NO: 5499 - RNA, 20 nt, Artificial Sequence
  Synthetic
cgacggccgagagcuccaga

SEQ ID NO: 5500 - RNA, 20 nt, Artificial Sequence
  Synthetic
aaaaacagcuggcccaccag

SEQ ID NO: 5501 - RNA, 20 nt, Artificial Sequence
  Synthetic
aaaacagcuggcccaccagc

SEQ ID NO: 5502 - RNA, 20 nt, Artificial Sequence
  Synthetic
aaacagcuggcccaccagca

SEQ ID NO: 5503 - RNA, 20 nt, Artificial Sequence
  Synthetic
cgccgaucaccccgcguugc

SEQ ID NO: 5504 - RNA, 20 nt, Artificial Sequence
  Synthetic
cgggcccggcggcguaguag

SEQ ID NO: 5505 - RNA, 20 nt, Artificial Sequence
  Synthetic
gggcccggcggcguaguagg

SEQ ID NO: 5506 - RNA, 20 nt, Artificial Sequence
  Synthetic
ggcccggcggcguaguaggc

SEQ ID NO: 5507 - RNA, 20 nt, Artificial Sequence
  Synthetic
agguccuucuucuuguccuu

SEQ ID NO: 5508 - RNA, 20 nt, Artificial Sequence
  Synthetic
ggacggcuucggccacggcg

SEQ ID NO: 5509 - RNA, 20 nt, Artificial Sequence
  Synthetic
cacggcguugagcuuguagc

SEQ ID NO: 5510 - RNA, 20 nt, Artificial Sequence
  Synthetic
cggcguugagcuuguagcuc

SEQ ID NO: 5511 - RNA, 20 nt, Artificial Sequence
  Synthetic
accuuuaucuugcugcgcuu

SEQ ID NO: 5512 - RNA, 20 nt, Artificial Sequence
  Synthetic
ccuuuaucuugcugcgcuuc

SEQ ID NO: 5513 - RNA, 20 nt, Artificial Sequence
  Synthetic
cucuggccuaugucccacac

SEQ ID NO: 5514 - RNA, 20 nt, Artificial Sequence
  Synthetic
uucaugcggccguacccguc

SEQ ID NO: 5515 - RNA, 20 nt, Artificial Sequence
  Synthetic
ucaugcggccguacccgucc

SEQ ID NO: 5516 - RNA, 20 nt, Artificial Sequence
  Synthetic
caugcggccguacccgucca

SEQ ID NO: 5517 - RNA, 20 nt, Artificial Sequence
  Synthetic
augcggccguacccguccag

SEQ ID NO: 5518 - RNA, 20 nt, Artificial Sequence
  Synthetic
uguccgucagcuuggccagc

SEQ ID NO: 5519 - RNA, 20 nt, Artificial Sequence
  Synthetic
ccgucagcuuggccagcaag

SEQ ID NO: 5520 - RNA, 20 nt, Artificial Sequence
  Synthetic
uggccagcaagaagggccag

SEQ ID NO: 5521 - RNA, 20 nt, Artificial Sequence
  Synthetic
ugaugauguuguacccgguc

SEQ ID NO: 5522 - RNA, 20 nt, Artificial Sequence
  Synthetic
uguuguacccggucacgaac

SEQ ID NO: 5523 - RNA, 20 nt, Artificial Sequence
  Synthetic
guuguacccggucacgaacu

SEQ ID NO: 5524 - RNA, 20 nt, Artificial Sequence
  Synthetic
ucggggccguacuguuucac

SEQ ID NO: 5525 - RNA, 20 nt, Artificial Sequence
  Synthetic
cguacuguuucacaaggguc

SEQ ID NO: 5526 - RNA, 20 nt, Artificial Sequence
  Synthetic
ucaugaaggccaacagcauc

SEQ ID NO: 5527 - RNA, 20 nt, Artificial Sequence
  Synthetic
acagcaucucgaauucgcug

SEQ ID NO: 5528 - RNA, 20 nt, Artificial Sequence
  Synthetic
ucgaauucgcugucgaauuc

SEQ ID NO: 5529 - RNA, 20 nt, Artificial Sequence
  Synthetic
cgcugucgaauuccagaacc

SEQ ID NO: 5530 - RNA, 20 nt, Artificial Sequence
  Synthetic
cgaauuccagaaccacgggc

SEQ ID NO: 5531 - RNA, 20 nt, Artificial Sequence
  Synthetic
cuggccgccagcucguucag

SEQ ID NO: 5532 - RNA, 20 nt, Artificial Sequence
  Synthetic
uggccgccagcucguucagg

SEQ ID NO: 5533 - RNA, 20 nt, Artificial Sequence
  Synthetic
ccagcucguucaggugggau

SEQ ID NO: 5534 - RNA, 20 nt, Artificial Sequence
  Synthetic
cagcucguucaggugggauu

SEQ ID NO: 5535 - RNA, 20 nt, Artificial Sequence
  Synthetic
agcucguucaggugggauuc

SEQ ID NO: 5536 - RNA, 20 nt, Artificial Sequence
  Synthetic
gcucguucaggugggauucg

SEQ ID NO: 5537 - RNA, 20 nt, Artificial Sequence
  Synthetic
ggugggauucggggaggucg

SEQ ID NO: 5538 - RNA, 20 nt, Artificial Sequence
  Synthetic
gugggauucggggaggucgc

SEQ ID NO: 5539 - RNA, 20 nt, Artificial Sequence
  Synthetic
auucggggaggucgcaggaa

SEQ ID NO: 5540 - RNA, 20 nt, Artificial Sequence
  Synthetic
ggggaggucgcaggaaccga

SEQ ID NO: 5541 - RNA, 20 nt, Artificial Sequence
  Synthetic
ucgcaggaaccgagcgaaaa

SEQ ID NO: 5542 - RNA, 20 nt, Artificial Sequence
  Synthetic
caggaaccgagcgaaaacag

SEQ ID NO: 5543 - RNA, 20 nt, Artificial Sequence
  Synthetic
gaaaacaggaggacgugcuc

SEQ ID NO: 5544 - RNA, 20 nt, Artificial Sequence
  Synthetic
ggacgugcuccagggcggug

SEQ ID NO: 5545 - RNA, 20 nt, Artificial Sequence
  Synthetic
gggcggugguggacaggucg

SEQ ID NO: 5546 - RNA, 20 nt, Artificial Sequence
  Synthetic
uggacaggucguagagcaga

SEQ ID NO: 5547 - RNA, 20 nt, Artificial Sequence
  Synthetic
ucguagagcagacaggauau

SEQ ID NO: 5548 - RNA, 20 nt, Artificial Sequence
  Synthetic
uaucuggaugaccagguccu

SEQ ID NO: 5549 - RNA, 20 nt, Artificial Sequence
  Synthetic
guccuccgggugcccggcca

SEQ ID NO: 5550 - RNA, 20 nt, Artificial Sequence
  Synthetic
uccuccgggugcccggccac

SEQ ID NO: 5551 - RNA, 20 nt, Artificial Sequence
  Synthetic
cccccgccuugcauucgaua

SEQ ID NO: 5552 - RNA, 20 nt, Artificial Sequence
  Synthetic
ugcauucgauaucgaagcac

SEQ ID NO: 5553 - RNA, 20 nt, Artificial Sequence
  Synthetic
uacaguuaaacucgacgucg

SEQ ID NO: 5554 - RNA, 20 nt, Artificial Sequence
  Synthetic
acucgacgucgcuggauguc

SEQ ID NO: 5555 - RNA, 20 nt, Artificial Sequence
  Synthetic
gcuggaugucccgaaggcca

SEQ ID NO: 5556 - RNA, 20 nt, Artificial Sequence
  Synthetic
cuggaugucccgaaggccau

SEQ ID NO: 5557 - RNA, 20 nt, Artificial Sequence
  Synthetic
aaggccaucggggccgccgg

SEQ ID NO: 5558 - RNA, 20 nt, Artificial Sequence
  Synthetic
gcguguuguuccggcccggu

SEQ ID NO: 5559 - RNA, 20 nt, Artificial Sequence
  Synthetic
ccgguuugagacgguaccag

SEQ ID NO: 5560 - RNA, 20 nt, Artificial Sequence
  Synthetic
gacgguaccagccgaaggug

SEQ ID NO: 5561 - RNA, 20 nt, Artificial Sequence
  Synthetic
accagccgaaggugacgaac

SEQ ID NO: 5562 - RNA, 20 nt, Artificial Sequence
  Synthetic
ccagccgaaggugacgaacc

SEQ ID NO: 5563 - RNA, 20 nt, Artificial Sequence
  Synthetic
gugacgaacccgggguuguc

SEQ ID NO: 5564 - RNA, 20 nt, Artificial Sequence
  Synthetic
cgaacccgggguuguccagg

SEQ ID NO: 5565 - RNA, 20 nt, Artificial Sequence
  Synthetic
ccgggguuguccaggaugaa

SEQ ID NO: 5566 - RNA, 20 nt, Artificial Sequence
  Synthetic
acccucguacuucuugaugg

SEQ ID NO: 5567 - RNA, 20 nt, Artificial Sequence
  Synthetic
cguacuucuugauggccggg

SEQ ID NO: 5568 - RNA, 20 nt, Artificial Sequence
  Synthetic
uacgacagcacacgcccgcu

SEQ ID NO: 5569 - RNA, 20 nt, Artificial Sequence
  Synthetic
cggacguagacgcgguaaaa

SEQ ID NO: 5570 - RNA, 20 nt, Artificial Sequence
  Synthetic
cguagacgcgguaaaacaga

SEQ ID NO: 5571 - RNA, 20 nt, Artificial Sequence
  Synthetic
guagacgcgguaaaacagag

SEQ ID NO: 5572 - RNA, 20 nt, Artificial Sequence
  Synthetic
ugcgcuccaccaccuccgcc

SEQ ID NO: 5573 - RNA, 20 nt, Artificial Sequence
  Synthetic
ccuccgccucgaaguggucc

SEQ ID NO: 5574 - RNA, 20 nt, Artificial Sequence
  Synthetic
cuccgccucgaagugguccg

SEQ ID NO: 5575 - RNA, 20 nt, Artificial Sequence
  Synthetic
aagugguccgcggagaugcc

SEQ ID NO: 5576 - RNA, 20 nt, Artificial Sequence
  Synthetic
agugguccgcggagaugccg

SEQ ID NO: 5577 - RNA, 20 nt, Artificial Sequence
  Synthetic
gaugccgcggaacgacgcgc

SEQ ID NO: 5578 - RNA, 20 nt, Artificial Sequence
  Synthetic
augccgcggaacgacgcgcc

SEQ ID NO: 5579 - RNA, 20 nt, Artificial Sequence
  Synthetic
ugccgcggaacgacgcgccc

SEQ ID NO: 5580 - RNA, 20 nt, Artificial Sequence
  Synthetic
gacgcgcccggggacucgcg

SEQ ID NO: 5581 - RNA, 20 nt, Artificial Sequence
  Synthetic
gggccgcggccaugcgcucg

SEQ ID NO: 5582 - RNA, 20 nt, Artificial Sequence
  Synthetic
caugcgcucgcagagaucuc

SEQ ID NO: 5583 - RNA, 20 nt, Artificial Sequence
  Synthetic
augcgcucgcagagaucucg

SEQ ID NO: 5584 - RNA, 20 nt, Artificial Sequence
  Synthetic
uacugccgcgugccguaaac

SEQ ID NO: 5585 - RNA, 20 nt, Artificial Sequence
  Synthetic
aacggccacccgguggccuu

SEQ ID NO: 5586 - RNA, 20 nt, Artificial Sequence
  Synthetic
acggccacccgguggccuuc

SEQ ID NO: 5587 - RNA, 20 nt, Artificial Sequence
  Synthetic
uggccuuccggagucaggcc

SEQ ID NO: 5588 - RNA, 20 nt, Artificial Sequence
  Synthetic
ggccuuccggagucaggccc

SEQ ID NO: 5589 - RNA, 17 nt, Artificial Sequence
  Synthetic
gcucuaugcaacauucg

SEQ ID NO: 5590 - RNA, 17 nt, Artificial Sequence
  Synthetic
cgccggcacccaccgcc

SEQ ID NO: 5591 - RNA, 17 nt, Artificial Sequence
  Synthetic
gccccgaacccugcggu

SEQ ID NO: 5592 - RNA, 17 nt, Artificial Sequence
  Synthetic
ccccgaacccugcgguc

SEQ ID NO: 5593 - RNA, 17 nt, Artificial Sequence
  Synthetic
ccgcgcggccacgucgu

SEQ ID NO: 5594 - RNA, 17 nt, Artificial Sequence
  Synthetic
cgcgcggccacgucguc

SEQ ID NO: 5595 - RNA, 17 nt, Artificial Sequence
  Synthetic
gcgcggccacgucgucc

SEQ ID NO: 5596 - RNA, 17 nt, Artificial Sequence
  Synthetic
cgcggccacgucguccg

SEQ ID NO: 5597 - RNA, 17 nt, Artificial Sequence
  Synthetic
ccggggggugccacacu

SEQ ID NO: 5598 - RNA, 17 nt, Artificial Sequence
  Synthetic
cggggggugccacacuu

SEQ ID NO: 5599 - RNA, 17 nt, Artificial Sequence
  Synthetic
ggggggugccacacuuc

SEQ ID NO: 5600 - RNA, 17 nt, Artificial Sequence
  Synthetic
uuggcguuauucccaaa

SEQ ID NO: 5601 - RNA, 17 nt, Artificial Sequence
  Synthetic
uauucccaaacagggcc

SEQ ID NO: 5602 - RNA, 17 nt, Artificial Sequence
  Synthetic
cacgccgcccccaacag

SEQ ID NO: 5603 - RNA, 17 nt, Artificial Sequence
  Synthetic
cgccgcccccaacaggu

SEQ ID NO: 5604 - RNA, 17 nt, Artificial Sequence
  Synthetic
ccgcccccaacaggugg

SEQ ID NO: 5605 - RNA, 17 nt, Artificial Sequence
  Synthetic
aaguaauaguccguguu

SEQ ID NO: 5606 - RNA, 17 nt, Artificial Sequence
  Synthetic
guguucagggcgacgcc

SEQ ID NO: 5607 - RNA, 17 nt, Artificial Sequence
  Synthetic
cgugggcaauggcguau

SEQ ID NO: 5608 - RNA, 17 nt, Artificial Sequence
  Synthetic
gugggcaauggcguaug

SEQ ID NO: 5609 - RNA, 17 nt, Artificial Sequence
  Synthetic
cgggauccucggccagc

SEQ ID NO: 5610 - RNA, 17 nt, Artificial Sequence
  Synthetic
ucggacaccagcagcuu

SEQ ID NO: 5611 - RNA, 17 nt, Artificial Sequence
  Synthetic
cggacaccagcagcuug

SEQ ID NO: 5612 - RNA, 17 nt, Artificial Sequence
  Synthetic
ccagcagcuugcggggc

SEQ ID NO: 5613 - RNA, 17 nt, Artificial Sequence
  Synthetic
gggcuuggacgcgccuc

SEQ ID NO: 5614 - RNA, 17 nt, Artificial Sequence
  Synthetic
ggcuuggacgcgccucc

SEQ ID NO: 5615 - RNA, 17 nt, Artificial Sequence
  Synthetic
gcuuggacgcgccuccc

SEQ ID NO: 5616 - RNA, 17 nt, Artificial Sequence
  Synthetic
cuuggacgcgccucccg

SEQ ID NO: 5617 - RNA, 17 nt, Artificial Sequence
  Synthetic
gcaggcgacggcgucuc

SEQ ID NO: 5618 - RNA, 17 nt, Artificial Sequence
  Synthetic
caggcgacggcgucucc

SEQ ID NO: 5619 - RNA, 17 nt, Artificial Sequence
  Synthetic
aggcgacggcgucuccc

SEQ ID NO: 5620 - RNA, 17 nt, Artificial Sequence
  Synthetic
cucccgggggcgcuugg

SEQ ID NO: 5621 - RNA, 17 nt, Artificial Sequence
  Synthetic
ucccgggggcgcuuggc

SEQ ID NO: 5622 - RNA, 17 nt, Artificial Sequence
  Synthetic
cccgggggcgcuuggcc

SEQ ID NO: 5623 - RNA, 17 nt, Artificial Sequence
  Synthetic
ccgggggcgcuuggccg

SEQ ID NO: 5624 - RNA, 17 nt, Artificial Sequence
  Synthetic
gggggcgcuuggccggg

SEQ ID NO: 5625 - RNA, 17 nt, Artificial Sequence
  Synthetic
cgcuuggccggggaggg

SEQ ID NO: 5626 - RNA, 17 nt, Artificial Sequence
  Synthetic
ccggggagggcagggcc

SEQ ID NO: 5627 - RNA, 17 nt, Artificial Sequence
  Synthetic
gcagggccgcggggggg

SEQ ID NO: 5628 - RNA, 17 nt, Artificial Sequence
  Synthetic
gggggcgggcucguccc

SEQ ID NO: 5629 - RNA, 17 nt, Artificial Sequence
  Synthetic
ggggcgggcucgucccc

SEQ ID NO: 5630 - RNA, 17 nt, Artificial Sequence
  Synthetic
gcggcggcgucuagcuc

SEQ ID NO: 5631 - RNA, 17 nt, Artificial Sequence
  Synthetic
cggcggcgucuagcucg

SEQ ID NO: 5632 - RNA, 17 nt, Artificial Sequence
  Synthetic
gcggcgucuagcucgcg

SEQ ID NO: 5633 - RNA, 17 nt, Artificial Sequence
  Synthetic
accgucuccucuaccuc

SEQ ID NO: 5634 - RNA, 17 nt, Artificial Sequence
  Synthetic
uccucuaccucgcgggu

SEQ ID NO: 5635 - RNA, 17 nt, Artificial Sequence
  Synthetic
cugggccacgaucacgu

SEQ ID NO: 5636 - RNA, 17 nt, Artificial Sequence
  Synthetic
ugggccacgaucacgua

SEQ ID NO: 5637 - RNA, 17 nt, Artificial Sequence
  Synthetic
acgggauccgguccuug

SEQ ID NO: 5638 - RNA, 17 nt, Artificial Sequence
  Synthetic
gauccgguccuugaugg

SEQ ID NO: 5639 - RNA, 17 nt, Artificial Sequence
  Synthetic
auccgguccuugaugga

SEQ ID NO: 5640 - RNA, 17 nt, Artificial Sequence
  Synthetic
gacgggaccugcgcgcg

SEQ ID NO: 5641 - RNA, 17 nt, Artificial Sequence
  Synthetic
ccugcgcgcggcgggcc

SEQ ID NO: 5642 - RNA, 17 nt, Artificial Sequence
  Synthetic
uuguaauacaccgucag

SEQ ID NO: 5643 - RNA, 17 nt, Artificial Sequence
  Synthetic
cuuguugguguacgcgc

SEQ ID NO: 5644 - RNA, 17 nt, Artificial Sequence
  Synthetic
gucugcucaguucggcg

SEQ ID NO: 5645 - RNA, 17 nt, Artificial Sequence
  Synthetic
cugcucaguucggcggu

SEQ ID NO: 5646 - RNA, 17 nt, Artificial Sequence
  Synthetic
gcggugaggacaaaguc

SEQ ID NO: 5647 - RNA, 17 nt, Artificial Sequence
  Synthetic
guccuggaugucccucu

SEQ ID NO: 5648 - RNA, 17 nt, Artificial Sequence
  Synthetic
gggucggugaugcgccg

SEQ ID NO: 5649 - RNA, 17 nt, Artificial Sequence
  Synthetic
ugcgccgaugggcgucu

SEQ ID NO: 5650 - RNA, 17 nt, Artificial Sequence
  Synthetic
cgccgaugggcgucuac

SEQ ID NO: 5651 - RNA, 17 nt, Artificial Sequence
  Synthetic
cgucuacgaggacggcc

SEQ ID NO: 5652 - RNA, 17 nt, Artificial Sequence
  Synthetic
cgaacgccugcaguccc

SEQ ID NO: 5653 - RNA, 17 nt, Artificial Sequence
  Synthetic
gccugcagucccucggg

SEQ ID NO: 5654 - RNA, 17 nt, Artificial Sequence
  Synthetic
ccugcagucccucgggc

SEQ ID NO: 5655 - RNA, 17 nt, Artificial Sequence
  Synthetic
gcgccagccacuccucc

SEQ ID NO: 5656 - RNA, 17 nt, Artificial Sequence
  Synthetic
cgccagccacuccuccg

SEQ ID NO: 5657 - RNA, 17 nt, Artificial Sequence
  Synthetic
cuaacgcggcggccgcu

SEQ ID NO: 5658 - RNA, 17 nt, Artificial Sequence
  Synthetic
uaacgcggcggccgcuc

SEQ ID NO: 5659 - RNA, 17 nt, Artificial Sequence
  Synthetic
uaaaacagcaggucgac

SEQ ID NO: 5660 - RNA, 17 nt, Artificial Sequence
  Synthetic
gcaggucgaccagggcc

SEQ ID NO: 5661 - RNA, 17 nt, Artificial Sequence
  Synthetic
caggucgaccagggccc

SEQ ID NO: 5662 - RNA, 17 nt, Artificial Sequence
  Synthetic
ccagauccacgcccuug

SEQ ID NO: 5663 - RNA, 17 nt, Artificial Sequence
  Synthetic
cgaucagcagcagcuug

SEQ ID NO: 5664 - RNA, 17 nt, Artificial Sequence
  Synthetic
ugaacgucuuuucgcac

SEQ ID NO: 5665 - RNA, 17 nt, Artificial Sequence
  Synthetic
uuucgcacucgaguuug

SEQ ID NO: 5666 - RNA, 17 nt, Artificial Sequence
  Synthetic
uucgcacucgaguuuga

SEQ ID NO: 5667 - RNA, 17 nt, Artificial Sequence
  Synthetic
ucgcacucgaguuugau

SEQ ID NO: 5668 - RNA, 17 nt, Artificial Sequence
  Synthetic
cgcacucgaguuugaug

SEQ ID NO: 5669 - RNA, 17 nt, Artificial Sequence
  Synthetic
ucgaguuugaugggggg

SEQ ID NO: 5670 - RNA, 17 nt, Artificial Sequence
  Synthetic
gggcagaaacagcgcgc

SEQ ID NO: 5671 - RNA, 17 nt, Artificial Sequence
  Synthetic
ccgucagcccggcggcc

SEQ ID NO: 5672 - RNA, 17 nt, Artificial Sequence
  Synthetic
cgcggcacagcacaaag

SEQ ID NO: 5673 - RNA, 17 nt, Artificial Sequence
  Synthetic
ccccguagaugaugcgc

SEQ ID NO: 5674 - RNA, 17 nt, Artificial Sequence
  Synthetic
cccguagaugaugcgca

SEQ ID NO: 5675 - RNA, 17 nt, Artificial Sequence
  Synthetic
agaugaugcgcauggaa

SEQ ID NO: 5676 - RNA, 17 nt, Artificial Sequence
  Synthetic
ugcgcauggaauagggc

SEQ ID NO: 5677 - RNA, 17 nt, Artificial Sequence
  Synthetic
gcgcauggaauagggcc

SEQ ID NO: 5678 - RNA, 17 nt, Artificial Sequence
  Synthetic
cgcauggaauagggccc

SEQ ID NO: 5679 - RNA, 17 nt, Artificial Sequence
  Synthetic
gcgcaugucggccgccu

SEQ ID NO: 5680 - RNA, 17 nt, Artificial Sequence
  Synthetic
cgcaugucggccgccuc

SEQ ID NO: 5681 - RNA, 17 nt, Artificial Sequence
  Synthetic
gcaugucggccgccucc

SEQ ID NO: 5682 - RNA, 17 nt, Artificial Sequence
  Synthetic
gccuccgggaaaucggc

SEQ ID NO: 5683 - RNA, 17 nt, Artificial Sequence
  Synthetic
ccuccgggaaaucggcc

SEQ ID NO: 5684 - RNA, 17 nt, Artificial Sequence
  Synthetic
aaucggccaggagcugu

SEQ ID NO: 5685 - RNA, 17 nt, Artificial Sequence
  Synthetic
aaggccgcccagcgcgc

SEQ ID NO: 5686 - RNA, 17 nt, Artificial Sequence
  Synthetic
cgcgcguggacguacuc

SEQ ID NO: 5687 - RNA, 17 nt, Artificial Sequence
  Synthetic
ggacguacucgcggguc

SEQ ID NO: 5688 - RNA, 17 nt, Artificial Sequence
  Synthetic
gcaacgugcaggcacgg

SEQ ID NO: 5689 - RNA, 17 nt, Artificial Sequence
  Synthetic
caacgugcaggcacggc

SEQ ID NO: 5690 - RNA, 17 nt, Artificial Sequence
  Synthetic
guccgugcugcacuccc

SEQ ID NO: 5691 - RNA, 17 nt, Artificial Sequence
  Synthetic
ucccgugaacccguaca

SEQ ID NO: 5692 - RNA, 17 nt, Artificial Sequence
  Synthetic
gcggccugcugcuuguc

SEQ ID NO: 5693 - RNA, 17 nt, Artificial Sequence
  Synthetic
cggccugcugcuugucc

SEQ ID NO: 5694 - RNA, 17 nt, Artificial Sequence
  Synthetic
ccaggagcacggccucc

SEQ ID NO: 5695 - RNA, 17 nt, Artificial Sequence
  Synthetic
caggagcacggccuccu

SEQ ID NO: 5696 - RNA, 17 nt, Artificial Sequence
  Synthetic
gccuccucggggcugcu

SEQ ID NO: 5697 - RNA, 17 nt, Artificial Sequence
  Synthetic
ccuccucggggcugcuc

SEQ ID NO: 5698 - RNA, 17 nt, Artificial Sequence
  Synthetic
cuccucggggcugcucu

SEQ ID NO: 5699 - RNA, 17 nt, Artificial Sequence
  Synthetic
uccucggggcugcucug

SEQ ID NO: 5700 - RNA, 17 nt, Artificial Sequence
  Synthetic
gcugcucuggggaaucc

SEQ ID NO: 5701 - RNA, 17 nt, Artificial Sequence
  Synthetic
cucuggggaauccgcga

SEQ ID NO: 5702 - RNA, 17 nt, Artificial Sequence
  Synthetic
ggaucugcuuucgcaug

SEQ ID NO: 5703 - RNA, 17 nt, Artificial Sequence
  Synthetic
auggcgagccagucccg

SEQ ID NO: 5704 - RNA, 17 nt, Artificial Sequence
  Synthetic
uggcgagccagucccgc

SEQ ID NO: 5705 - RNA, 17 nt, Artificial Sequence
  Synthetic
gcgagccagucccgcag

SEQ ID NO: 5706 - RNA, 17 nt, Artificial Sequence
  Synthetic
agucccgcaggaggaug

SEQ ID NO: 5707 - RNA, 17 nt, Artificial Sequence
  Synthetic
ucccgcaggaggaugcu

SEQ ID NO: 5708 - RNA, 17 nt, Artificial Sequence
  Synthetic
cccgcaggaggaugcug

SEQ ID NO: 5709 - RNA, 17 nt, Artificial Sequence
  Synthetic
aggaggcucucucgcac

SEQ ID NO: 5710 - RNA, 17 nt, Artificial Sequence
  Synthetic
cucgcacgugagccuug

SEQ ID NO: 5711 - RNA, 17 nt, Artificial Sequence
  Synthetic
gcacgugagccuugacg

SEQ ID NO: 5712 - RNA, 17 nt, Artificial Sequence
  Synthetic
gccacugcgucggcccu

SEQ ID NO: 5713 - RNA, 17 nt, Artificial Sequence
  Synthetic
ccacugcgucggcccuc

SEQ ID NO: 5714 - RNA, 17 nt, Artificial Sequence
  Synthetic
cacugcgucggcccuca

SEQ ID NO: 5715 - RNA, 17 nt, Artificial Sequence
  Synthetic
cugcgucggcccucagg

SEQ ID NO: 5716 - RNA, 17 nt, Artificial Sequence
  Synthetic
cccucagggagagcgug

SEQ ID NO: 5717 - RNA, 17 nt, Artificial Sequence
  Synthetic
gugcugaagcacagguu

SEQ ID NO: 5718 - RNA, 17 nt, Artificial Sequence
  Synthetic
aagcacagguugugggc

SEQ ID NO: 5719 - RNA, 17 nt, Artificial Sequence
  Synthetic
ugugggccuggaugaug

SEQ ID NO: 5720 - RNA, 17 nt, Artificial Sequence
  Synthetic
gugggccuggaugaugc

SEQ ID NO: 5721 - RNA, 17 nt, Artificial Sequence
  Synthetic
gguacaggcuggcaaag

SEQ ID NO: 5722 - RNA, 17 nt, Artificial Sequence
  Synthetic
caaagucgaacaccacc

SEQ ID NO: 5723 - RNA, 17 nt, Artificial Sequence
  Synthetic
aaagucgaacaccacca

SEQ ID NO: 5724 - RNA, 17 nt, Artificial Sequence
  Synthetic
accaccacgggguucac

SEQ ID NO: 5725 - RNA, 17 nt, Artificial Sequence
  Synthetic
cgggguucacgugaaac

SEQ ID NO: 5726 - RNA, 17 nt, Artificial Sequence
  Synthetic
gggguucacgugaaacc

SEQ ID NO: 5727 - RNA, 17 nt, Artificial Sequence
  Synthetic
ucacgugaaacccggaa

SEQ ID NO: 5728 - RNA, 17 nt, Artificial Sequence
  Synthetic
cacgugaaacccggaag

SEQ ID NO: 5729 - RNA, 17 nt, Artificial Sequence
  Synthetic
aacccggaagugggguc

SEQ ID NO: 5730 - RNA, 17 nt, Artificial Sequence
  Synthetic
ggccgcuccucguccuc

SEQ ID NO: 5731 - RNA, 17 nt, Artificial Sequence
  Synthetic
guccucccgggcugcgg

SEQ ID NO: 5732 - RNA, 17 nt, Artificial Sequence
  Synthetic
gggcugcggccggacgc

SEQ ID NO: 5733 - RNA, 17 nt, Artificial Sequence
  Synthetic
gcgccccuaaaucgccc

SEQ ID NO: 5734 - RNA, 17 nt, Artificial Sequence
  Synthetic
cgccccuggguguccgg

SEQ ID NO: 5735 - RNA, 17 nt, Artificial Sequence
  Synthetic
agcaggcacguaaagac

SEQ ID NO: 5736 - RNA, 17 nt, Artificial Sequence
  Synthetic
uggccgucguagauggu

SEQ ID NO: 5737 - RNA, 17 nt, Artificial Sequence
  Synthetic
cgccaagcgcgcgacgg

SEQ ID NO: 5738 - RNA, 17 nt, Artificial Sequence
  Synthetic
ccaagcgcgcgacggcc

SEQ ID NO: 5739 - RNA, 17 nt, Artificial Sequence
  Synthetic
acggccgagagcuccag

SEQ ID NO: 5740 - RNA, 17 nt, Artificial Sequence
  Synthetic
cggccgagagcuccaga

SEQ ID NO: 5741 - RNA, 17 nt, Artificial Sequence
  Synthetic
aacagcuggcccaccag

SEQ ID NO: 5742 - RNA, 17 nt, Artificial Sequence
  Synthetic
acagcuggcccaccagc

SEQ ID NO: 5743 - RNA, 17 nt, Artificial Sequence
  Synthetic
cagcuggcccaccagca

SEQ ID NO: 5744 - RNA, 17 nt, Artificial Sequence
  Synthetic
cgaucaccccgcguugc

SEQ ID NO: 5745 - RNA, 17 nt, Artificial Sequence
  Synthetic
gcccggcggcguaguag

SEQ ID NO: 5746 - RNA, 17 nt, Artificial Sequence
  Synthetic
cccggcggcguaguagg

SEQ ID NO: 5747 - RNA, 17 nt, Artificial Sequence
  Synthetic
ccggcggcguaguaggc

SEQ ID NO: 5748 - RNA, 17 nt, Artificial Sequence
  Synthetic
uccuucuucuuguccuu

SEQ ID NO: 5749 - RNA, 17 nt, Artificial Sequence
  Synthetic
cggcuucggccacggcg

SEQ ID NO: 5750 - RNA, 17 nt, Artificial Sequence
  Synthetic
ggcguugagcuuguagc

SEQ ID NO: 5751 - RNA, 17 nt, Artificial Sequence
  Synthetic
cguugagcuuguagcuc

SEQ ID NO: 5752 - RNA, 17 nt, Artificial Sequence
  Synthetic
uuuaucuugcugcgcuu

SEQ ID NO: 5753 - RNA, 17 nt, Artificial Sequence
  Synthetic
uuaucuugcugcgcuuc

SEQ ID NO: 5754 - RNA, 17 nt, Artificial Sequence
  Synthetic
uggccuaugucccacac

SEQ ID NO: 5755 - RNA, 17 nt, Artificial Sequence
  Synthetic
augcggccguacccguc

SEQ ID NO: 5756 - RNA, 17 nt, Artificial Sequence
  Synthetic
ugcggccguacccgucc

SEQ ID NO: 5757 - RNA, 17 nt, Artificial Sequence
  Synthetic
gcggccguacccgucca

SEQ ID NO: 5758 - RNA, 17 nt, Artificial Sequence
  Synthetic
cggccguacccguccag

SEQ ID NO: 5759 - RNA, 17 nt, Artificial Sequence
  Synthetic
ccgucagcuuggccagc

SEQ ID NO: 5760 - RNA, 17 nt, Artificial Sequence
  Synthetic
ucagcuuggccagcaag

SEQ ID NO: 5761 - RNA, 17 nt, Artificial Sequence
  Synthetic
ccagcaagaagggccag

SEQ ID NO: 5762 - RNA, 17 nt, Artificial Sequence
  Synthetic
ugauguuguacccgguc

SEQ ID NO: 5763 - RNA, 17 nt, Artificial Sequence
  Synthetic
uguacccggucacgaac

SEQ ID NO: 5764 - RNA, 17 nt, Artificial Sequence
  Synthetic
guacccggucacgaacu

SEQ ID NO: 5765 - RNA, 17 nt, Artificial Sequence
  Synthetic
gggccguacuguuucac

SEQ ID NO: 5766 - RNA, 17 nt, Artificial Sequence
  Synthetic
acuguuucacaaggguc

SEQ ID NO: 5767 - RNA, 17 nt, Artificial Sequence
  Synthetic
ugaaggccaacagcauc

SEQ ID NO: 5768 - RNA, 17 nt, Artificial Sequence
  Synthetic
gcaucucgaauucgcug

SEQ ID NO: 5769 - RNA, 17 nt, Artificial Sequence
  Synthetic
aauucgcugucgaauuc

SEQ ID NO: 5770 - RNA, 17 nt, Artificial Sequence
  Synthetic
ugucgaauuccagaacc

SEQ ID NO: 5771 - RNA, 17 nt, Artificial Sequence
  Synthetic
auuccagaaccacgggc

SEQ ID NO: 5772 - RNA, 17 nt, Artificial Sequence
  Synthetic
gccgccagcucguucag

SEQ ID NO: 5773 - RNA, 17 nt, Artificial Sequence
  Synthetic
ccgccagcucguucagg

SEQ ID NO: 5774 - RNA, 17 nt, Artificial Sequence
  Synthetic
gcucguucaggugggau

SEQ ID NO: 5775 - RNA, 17 nt, Artificial Sequence
  Synthetic
cucguucaggugggauu

SEQ ID NO: 5776 - RNA, 17 nt, Artificial Sequence
  Synthetic
ucguucaggugggauuc

SEQ ID NO: 5777 - RNA, 17 nt, Artificial Sequence
  Synthetic
cguucaggugggauucg

SEQ ID NO: 5778 - RNA, 17 nt, Artificial Sequence
  Synthetic
gggauucggggaggucg

SEQ ID NO: 5779 - RNA, 17 nt, Artificial Sequence
  Synthetic
ggauucggggaggucgc

SEQ ID NO: 5780 - RNA, 17 nt, Artificial Sequence
  Synthetic
cggggaggucgcaggaa

SEQ ID NO: 5781 - RNA, 17 nt, Artificial Sequence
  Synthetic
gaggucgcaggaaccga

SEQ ID NO: 5782 - RNA, 17 nt, Artificial Sequence
  Synthetic
caggaaccgagcgaaaa

SEQ ID NO: 5783 - RNA, 17 nt, Artificial Sequence
  Synthetic
gaaccgagcgaaaacag

SEQ ID NO: 5784 - RNA, 17 nt, Artificial Sequence
  Synthetic
aacaggaggacgugcuc

SEQ ID NO: 5785 - RNA, 17 nt, Artificial Sequence
  Synthetic
cgugcuccagggcggug

SEQ ID NO: 5786 - RNA, 17 nt, Artificial Sequence
  Synthetic
cggugguggacaggucg

SEQ ID NO: 5787 - RNA, 17 nt, Artificial Sequence
  Synthetic
acaggucguagagcaga

SEQ ID NO: 5788 - RNA, 17 nt, Artificial Sequence
  Synthetic
uagagcagacaggauau

SEQ ID NO: 5789 - RNA, 17 nt, Artificial Sequence
  Synthetic
cuggaugaccagguccu

SEQ ID NO: 5790 - RNA, 17 nt, Artificial Sequence
  Synthetic
cuccgggugcccggcca

SEQ ID NO: 5791 - RNA, 17 nt, Artificial Sequence
  Synthetic
uccgggugcccggccac

SEQ ID NO: 5792 - RNA, 17 nt, Artificial Sequence
  Synthetic
ccgccuugcauucgaua

SEQ ID NO: 5793 - RNA, 17 nt, Artificial Sequence
  Synthetic
auucgauaucgaagcac

SEQ ID NO: 5794 - RNA, 17 nt, Artificial Sequence
  Synthetic
aguuaaacucgacgucg

SEQ ID NO: 5795 - RNA, 17 nt, Artificial Sequence
  Synthetic
cgacgucgcuggauguc

SEQ ID NO: 5796 - RNA, 17 nt, Artificial Sequence
  Synthetic
ggaugucccgaaggcca

SEQ ID NO: 5797 - RNA, 17 nt, Artificial Sequence
  Synthetic
gaugucccgaaggccau

SEQ ID NO: 5798 - RNA, 17 nt, Artificial Sequence
  Synthetic
gccaucggggccgccgg

SEQ ID NO: 5799 - RNA, 17 nt, Artificial Sequence
  Synthetic
uguuguuccggcccggu

SEQ ID NO: 5800 - RNA, 17 nt, Artificial Sequence
  Synthetic
guuugagacgguaccag

SEQ ID NO: 5801 - RNA, 17 nt, Artificial Sequence
  Synthetic
gguaccagccgaaggug

SEQ ID NO: 5802 - RNA, 17 nt, Artificial Sequence
  Synthetic
agccgaaggugacgaac

SEQ ID NO: 5803 - RNA, 17 nt, Artificial Sequence
  Synthetic
gccgaaggugacgaacc

SEQ ID NO: 5804 - RNA, 17 nt, Artificial Sequence
  Synthetic
acgaacccgggguuguc

SEQ ID NO: 5805 - RNA, 17 nt, Artificial Sequence
  Synthetic
acccgggguuguccagg

SEQ ID NO: 5806 - RNA, 17 nt, Artificial Sequence
  Synthetic
ggguuguccaggaugaa

SEQ ID NO: 5807 - RNA, 17 nt, Artificial Sequence
  Synthetic
cucguacuucuugaugg

SEQ ID NO: 5808 - RNA, 17 nt, Artificial Sequence
  Synthetic
acuucuugauggccggg

SEQ ID NO: 5809 - RNA, 17 nt, Artificial Sequence
  Synthetic
gacagcacacgcccgcu

SEQ ID NO: 5810 - RNA, 17 nt, Artificial Sequence
  Synthetic
acguagacgcgguaaaa

SEQ ID NO: 5811 - RNA, 17 nt, Artificial Sequence
  Synthetic
agacgcgguaaaacaga

SEQ ID NO: 5812 - RNA, 17 nt, Artificial Sequence
  Synthetic
gacgcgguaaaacagag

SEQ ID NO: 5813 - RNA, 17 nt, Artificial Sequence
  Synthetic
gcuccaccaccuccgcc

SEQ ID NO: 5814 - RNA, 17 nt, Artificial Sequence
  Synthetic
ccgccucgaaguggucc

SEQ ID NO: 5815 - RNA, 17 nt, Artificial Sequence
  Synthetic
cgccucgaagugguccg

SEQ ID NO: 5816 - RNA, 17 nt, Artificial Sequence
  Synthetic
ugguccgcggagaugcc

SEQ ID NO: 5817 - RNA, 17 nt, Artificial Sequence
  Synthetic
gguccgcggagaugccg

SEQ ID NO: 5818 - RNA, 17 nt, Artificial Sequence
  Synthetic
gccgcggaacgacgcgc

SEQ ID NO: 5819 - RNA, 17 nt, Artificial Sequence
  Synthetic
gcgcccggggacucgcg

SEQ ID NO: 5820 - RNA, 17 nt, Artificial Sequence
  Synthetic
ccgcggccaugcgcucg

SEQ ID NO: 5821 - RNA, 17 nt, Artificial Sequence
  Synthetic
gcgcucgcagagaucuc

SEQ ID NO: 5822 - RNA, 17 nt, Artificial Sequence
  Synthetic
cgcucgcagagaucucg

SEQ ID NO: 5823 - RNA, 17 nt, Artificial Sequence
  Synthetic
ugccgcgugccguaaac

SEQ ID NO: 5824 - RNA, 17 nt, Artificial Sequence
  Synthetic
ggccacccgguggccuu

SEQ ID NO: 5825 - RNA, 17 nt, Artificial Sequence
  Synthetic
gccacccgguggccuuc

SEQ ID NO: 5826 - RNA, 17 nt, Artificial Sequence
  Synthetic
ccuuccggagucaggcc

SEQ ID NO: 5827 - RNA, 17 nt, Artificial Sequence
  Synthetic
cuuccggagucaggccc

SEQ ID NO: 5828 - RNA, 20 nt, Artificial Sequence
  Synthetic
acuauagcgaaugcgaugaa

SEQ ID NO: 5829 - RNA, 17 nt, Artificial Sequence
  Synthetic
auagcgaaugcgaugaa

SEQ ID NO: 5830 - RNA, 20 nt, Artificial Sequence
  Synthetic
gugaucggcgaguacugcau

SEQ ID NO: 5831 - RNA, 20 nt, Artificial Sequence
  Synthetic
uuauucugccggacacccag

SEQ ID NO: 5832 - RNA, 20 nt, Artificial Sequence
  Synthetic
caugcgaaagcagauccgcu

SEQ ID NO: 5833 - RNA, 20 nt, Artificial Sequence
  Synthetic
gcggccuucgaacagcuccu

SEQ ID NO: 5834 - RNA, 17 nt, Artificial Sequence
  Synthetic
aucggcgaguacugcau

SEQ ID NO: 5835 - RNA, 17 nt, Artificial Sequence
  Synthetic
uucugccggacacccag

SEQ ID NO: 5836 - RNA, 17 nt, Artificial Sequence
  Synthetic
gcgaaagcagauccgcu

SEQ ID NO: 5837 - RNA, 17 nt, Artificial Sequence
  Synthetic
gccuucgaacagcuccu

SEQ ID NO: 5838 - RNA, 20 nt, Artificial Sequence
  Synthetic
cgggggucccaaaaacaccc

SEQ ID NO: 5839 - RNA, 20 nt, Artificial Sequence
  Synthetic
gggucccaaaaacaccccgg

SEQ ID NO: 5840 - RNA, 20 nt, Artificial Sequence
  Synthetic
ggcccccccgcuguacgcaa

SEQ ID NO: 5841 - RNA, 20 nt, Artificial Sequence
  Synthetic
gcccccccgcuguacgcaac

SEQ ID NO: 5842 - RNA, 20 nt, Artificial Sequence
  Synthetic
cccccccgcuguacgcaacg

SEQ ID NO: 5843 - RNA, 20 nt, Artificial Sequence
  Synthetic
cgcaacggggcgccugagcc

SEQ ID NO: 5844 - RNA, 20 nt, Artificial Sequence
  Synthetic
uaaccgucuccucgacgacu

SEQ ID NO: 5845 - RNA, 20 nt, Artificial Sequence
  Synthetic
aaccgucuccucgacgacuu

SEQ ID NO: 5846 - RNA, 20 nt, Artificial Sequence
  Synthetic
cgacgacuugggcuuuagcg

SEQ ID NO: 5847 - RNA, 20 nt, Artificial Sequence
  Synthetic
gacgacuugggcuuuagcgc

SEQ ID NO: 5848 - RNA, 17 nt, Artificial Sequence
  Synthetic
gggucccaaaaacaccc

SEQ ID NO: 5849 - RNA, 17 nt, Artificial Sequence
  Synthetic
ucccaaaaacaccccgg

SEQ ID NO: 5850 - RNA, 17 nt, Artificial Sequence
  Synthetic
ccccccgcuguacgcaa

SEQ ID NO: 5851 - RNA, 17 nt, Artificial Sequence
  Synthetic
cccccgcuguacgcaac

SEQ ID NO: 5852 - RNA, 17 nt, Artificial Sequence
  Synthetic
ccccgcuguacgcaacg

SEQ ID NO: 5853 - RNA, 17 nt, Artificial Sequence
  Synthetic
aacggggcgccugagcc

SEQ ID NO: 5854 - RNA, 17 nt, Artificial Sequence
  Synthetic
ccgucuccucgacgacu

SEQ ID NO: 5855 - RNA, 17 nt, Artificial Sequence
  Synthetic
cgucuccucgacgacuu

SEQ ID NO: 5856 - RNA, 17 nt, Artificial Sequence
  Synthetic
cgacuugggcuuuagcg

SEQ ID NO: 5857 - RNA, 17 nt, Artificial Sequence
  Synthetic
gacuugggcuuuagcgc

SEQ ID NO: 5858 - RNA, 20 nt, Artificial Sequence
  Synthetic
caugcucgauaccuggaacg

SEQ ID NO: 5859 - RNA, 20 nt, Artificial Sequence
  Synthetic
cuggaacgaggaucuguuuu

SEQ ID NO: 5860 - RNA, 20 nt, Artificial Sequence
  Synthetic
cgaccaacgccgaccuguac

SEQ ID NO: 5861 - RNA, 20 nt, Artificial Sequence
  Synthetic
gaccaacgccgaccuguacc

SEQ ID NO: 5862 - RNA, 20 nt, Artificial Sequence
  Synthetic
aucaacgcugcccagcgaug

SEQ ID NO: 5863 - RNA, 20 nt, Artificial Sequence
  Synthetic
aacgcugcccagcgaugugg

SEQ ID NO: 5864 - RNA, 20 nt, Artificial Sequence
  Synthetic
ugcccagcgaugugguggaa

SEQ ID NO: 5865 - RNA, 17 nt, Artificial Sequence
  Synthetic
gcucgauaccuggaacg

SEQ ID NO: 5866 - RNA, 17 nt, Artificial Sequence
  Synthetic
gaacgaggaucuguuuu

SEQ ID NO: 5867 - RNA, 17 nt, Artificial Sequence
  Synthetic
ccaacgccgaccuguac

SEQ ID NO: 5868 - RNA, 17 nt, Artificial Sequence
  Synthetic
caacgccgaccuguacc

SEQ ID NO: 5869 - RNA, 17 nt, Artificial Sequence
  Synthetic
aacgcugcccagcgaug

SEQ ID NO: 5870 - RNA, 17 nt, Artificial Sequence
  Synthetic
gcugcccagcgaugugg

SEQ ID NO: 5871 - RNA, 17 nt, Artificial Sequence
  Synthetic
ccagcgaugugguggaa

SEQ ID NO: 5872 - RNA, 20 nt, Artificial Sequence
  Synthetic
cauucgcgcccacggcgacg

SEQ ID NO: 5873 - RNA, 20 nt, Artificial Sequence
  Synthetic
cguggccuucccuacgcuuc

SEQ ID NO: 5874 - RNA, 20 nt, Artificial Sequence
  Synthetic
acgcuuccggccacccgcga

SEQ ID NO: 5875 - RNA, 20 nt, Artificial Sequence
  Synthetic
ccggccacccgcgacggccu

SEQ ID NO: 5876 - RNA, 20 nt, Artificial Sequence
  Synthetic
cggccacccgcgacggccuc

SEQ ID NO: 5877 - RNA, 20 nt, Artificial Sequence
  Synthetic
guuucuuccacgccgagcua

SEQ ID NO: 5878 - RNA, 20 nt, Artificial Sequence
  Synthetic
uuucuuccacgccgagcuac

SEQ ID NO: 5879 - RNA, 20 nt, Artificial Sequence
  Synthetic
uccacgccgagcuacgggcg

SEQ ID NO: 5880 - RNA, 20 nt, Artificial Sequence
  Synthetic
ccacgccgagcuacgggcgc

SEQ ID NO: 5881 - RNA, 17 nt, Artificial Sequence
  Synthetic
ucgcgcccacggcgacg

SEQ ID NO: 5882 - RNA, 17 nt, Artificial Sequence
  Synthetic
ggccuucccuacgcuuc

SEQ ID NO: 5883 - RNA, 17 nt, Artificial Sequence
  Synthetic
cuuccggccacccgcga

SEQ ID NO: 5884 - RNA, 17 nt, Artificial Sequence
  Synthetic
gccacccgcgacggccu

SEQ ID NO: 5885 - RNA, 17 nt, Artificial Sequence
  Synthetic
ccacccgcgacggccuc

SEQ ID NO: 5886 - RNA, 17 nt, Artificial Sequence
  Synthetic
ucuuccacgccgagcua

SEQ ID NO: 5887 - RNA, 17 nt, Artificial Sequence
  Synthetic
cuuccacgccgagcuac

SEQ ID NO: 5888 - RNA, 17 nt, Artificial Sequence
  Synthetic
acgccgagcuacgggcg

SEQ ID NO: 5889 - RNA, 17 nt, Artificial Sequence
  Synthetic
cgccgagcuacgggcgc

SEQ ID NO: 5890 - RNA, 20 nt, Artificial Sequence
  Synthetic
cuccucccgcgcccguagcu

SEQ ID NO: 5891 - RNA, 20 nt, Artificial Sequence
  Synthetic
gcgcuucguaguagagcccg

SEQ ID NO: 5892 - RNA, 20 nt, Artificial Sequence
  Synthetic
guagagcccgaggccgucgc

SEQ ID NO: 5893 - RNA, 17 nt, Artificial Sequence
  Synthetic
cucccgcgcccguagcu

SEQ ID NO: 5894 - RNA, 17 nt, Artificial Sequence
  Synthetic
cuucguaguagagcccg

SEQ ID NO: 5895 - RNA, 17 nt, Artificial Sequence
  Synthetic
gagcccgaggccgucgc

SEQ ID NO: 5896 - RNA, 20 nt, Artificial Sequence
  Synthetic
ucgcggguggccggaagcgu

SEQ ID NO: 5897 - RNA, 17 nt, Artificial Sequence
  Synthetic
cggguggccggaagcgu

SEQ ID NO: 5898 - RNA, 20 nt, Artificial Sequence
  Synthetic
uagggaaggccacgucgccg

SEQ ID NO: 5899 - RNA, 20 nt, Artificial Sequence
  Synthetic
agggaaggccacgucgccgu

SEQ ID NO: 5900 - RNA, 20 nt, Artificial Sequence
  Synthetic
cgugggcgcgaaugucgauu

SEQ ID NO: 5901 - RNA, 20 nt, Artificial Sequence
  Synthetic
gugggcgcgaaugucgauuu

SEQ ID NO: 5902 - RNA, 17 nt, Artificial Sequence
  Synthetic
ggaaggccacgucgccg

SEQ ID NO: 5903 - RNA, 17 nt, Artificial Sequence
  Synthetic
gaaggccacgucgccgu

SEQ ID NO: 5904 - RNA, 17 nt, Artificial Sequence
  Synthetic
gggcgcgaaugucgauu

SEQ ID NO: 5905 - RNA, 17 nt, Artificial Sequence
  Synthetic
ggcgcgaaugucgauuu

SEQ ID NO: 5906 - RNA, 20 nt, Artificial Sequence
  Synthetic
cccccauuccaccacaucgc

SEQ ID NO: 5907 - RNA, 17 nt, Artificial Sequence
  Synthetic
ccauuccaccacaucgc

SEQ ID NO: 5908 - RNA, 20 nt, Artificial Sequence
  Synthetic
cucccgguacaggucggcgu

SEQ ID NO: 5909 - RNA, 20 nt, Artificial Sequence
  Synthetic
cgguacaggucggcguuggu

SEQ ID NO: 5910 - RNA, 20 nt, Artificial Sequence
  Synthetic
cgaaaacagauccucguucc

SEQ ID NO: 5911 - RNA, 20 nt, Artificial Sequence
  Synthetic
cucguuccagguaucgagca

SEQ ID NO: 5912 - RNA, 20 nt, Artificial Sequence
  Synthetic
aucgagcaugguacauagcg

SEQ ID NO: 5913 - RNA, 20 nt, Artificial Sequence
  Synthetic
ucgagcaugguacauagcgc

SEQ ID NO: 5914 - RNA, 20 nt, Artificial Sequence
  Synthetic
cgagcaugguacauagcgcg

SEQ ID NO: 5915 - RNA, 20 nt, Artificial Sequence
  Synthetic
cgcuaaagcccaagucgucg

SEQ ID NO: 5916 - RNA, 17 nt, Artificial Sequence
  Synthetic
ccgguacaggucggcgu

SEQ ID NO: 5917 - RNA, 17 nt, Artificial Sequence
  Synthetic
uacaggucggcguuggu

SEQ ID NO: 5918 - RNA, 17 nt, Artificial Sequence
  Synthetic
aaacagauccucguucc

SEQ ID NO: 5919 - RNA, 17 nt, Artificial Sequence
  Synthetic
guuccagguaucgagca

SEQ ID NO: 5920 - RNA, 17 nt, Artificial Sequence
  Synthetic
gagcaugguacauagcg

SEQ ID NO: 5921 - RNA, 17 nt, Artificial Sequence
  Synthetic
agcaugguacauagcgc

SEQ ID NO: 5922 - RNA, 17 nt, Artificial Sequence
  Synthetic
gcaugguacauagcgcg

SEQ ID NO: 5923 - RNA, 17 nt, Artificial Sequence
  Synthetic
uaaagcccaagucgucg

SEQ ID NO: 5924 - RNA, 20 nt, Artificial Sequence
  Synthetic
cgucgaggagacgguuaaag

SEQ ID NO: 5925 - RNA, 20 nt, Artificial Sequence
  Synthetic
gucgaggagacgguuaaaga

SEQ ID NO: 5926 - RNA, 17 nt, Artificial Sequence
  Synthetic
cgaggagacgguuaaag

SEQ ID NO: 5927 - RNA, 17 nt, Artificial Sequence
  Synthetic
gaggagacgguuaaaga

SEQ ID NO: 5928 - RNA, 20 nt, Artificial Sequence
  Synthetic
gagacgguuaaagagggcgg

SEQ ID NO: 5929 - RNA, 20 nt, Artificial Sequence
  Synthetic
agacgguuaaagagggcggc

SEQ ID NO: 5930 - RNA, 20 nt, Artificial Sequence
  Synthetic
gacgguuaaagagggcggcg

SEQ ID NO: 5931 - RNA, 20 nt, Artificial Sequence
  Synthetic
acgguuaaagagggcggcgg

SEQ ID NO: 5932 - RNA, 20 nt, Artificial Sequence
  Synthetic
cgguuaaagagggcggcggg

SEQ ID NO: 5933 - RNA, 17 nt, Artificial Sequence
  Synthetic
acgguuaaagagggcgg

SEQ ID NO: 5934 - RNA, 17 nt, Artificial Sequence
  Synthetic
cgguuaaagagggcggc

SEQ ID NO: 5935 - RNA, 17 nt, Artificial Sequence
  Synthetic
gguuaaagagggcggcg

SEQ ID NO: 5936 - RNA, 17 nt, Artificial Sequence
  Synthetic
guuaaagagggcggcgg

SEQ ID NO: 5937 - RNA, 17 nt, Artificial Sequence
  Synthetic
uuaaagagggcggcggg

SEQ ID NO: 5938 - RNA, 20 nt, Artificial Sequence
  Synthetic
gcgccccguugcguacagcg

SEQ ID NO: 5939 - RNA, 20 nt, Artificial Sequence
  Synthetic
cgccccguugcguacagcgg

SEQ ID NO: 5940 - RNA, 20 nt, Artificial Sequence
  Synthetic
gccccguugcguacagcggg

SEQ ID NO: 5941 - RNA, 20 nt, Artificial Sequence
  Synthetic
ccccguugcguacagcgggg

SEQ ID NO: 5942 - RNA, 17 nt, Artificial Sequence
  Synthetic
ccccguugcguacagcg

SEQ ID NO: 5943 - RNA, 17 nt, Artificial Sequence
  Synthetic
cccguugcguacagcgg

SEQ ID NO: 5944 - RNA, 17 nt, Artificial Sequence
  Synthetic
ccguugcguacagcggg

SEQ ID NO: 5945 - RNA, 17 nt, Artificial Sequence
  Synthetic
cguugcguacagcgggg

SEQ ID NO: 5946 - RNA, 20 nt, Artificial Sequence
  Synthetic
cguacagcgggggggccgcc

SEQ ID NO: 5947 - RNA, 20 nt, Artificial Sequence
  Synthetic
guacagcgggggggccgccg

SEQ ID NO: 5948 - RNA, 20 nt, Artificial Sequence
  Synthetic
gggggccgccgggguguuuu

SEQ ID NO: 5949 - RNA, 20 nt, Artificial Sequence
  Synthetic
ggggccgccgggguguuuuu

SEQ ID NO: 5950 - RNA, 17 nt, Artificial Sequence
  Synthetic
acagcgggggggccgcc

SEQ ID NO: 5951 - RNA, 17 nt, Artificial Sequence
  Synthetic
cagcgggggggccgccg

SEQ ID NO: 5952 - RNA, 17 nt, Artificial Sequence
  Synthetic
ggccgccgggguguuuu

SEQ ID NO: 5953 - RNA, 17 nt, Artificial Sequence
  Synthetic
gccgccgggguguuuuu

SEQ ID NO: 5954 - RNA, 20 nt, Artificial Sequence
  Synthetic
guguuuuugggacccccggc

SEQ ID NO: 5955 - RNA, 17 nt, Artificial Sequence
  Synthetic
uuuuugggacccccggc

SEQ ID NO: 5956 - RNA, 20 nt, Artificial Sequence
  Synthetic
uguuuuugggacccccggcc

SEQ ID NO: 5957 - RNA, 17 nt, Artificial Sequence
  Synthetic
uuuugggacccccggcc

SEQ ID NO: 5958 - RNA, 20 nt, Artificial Sequence
  Synthetic
caaacagcucgucgaccaag

SEQ ID NO: 5959 - RNA, 17 nt, Artificial Sequence
  Synthetic
acagcucgucgaccaag

SEQ ID NO: 5960 - RNA, 20 nt, Artificial Sequence
  Synthetic
gcuguuugccgacaugaacg

SEQ ID NO: 5961 - RNA, 20 nt, Artificial Sequence
  Synthetic
uuugccgacaugaacgcgga

SEQ ID NO: 5962 - RNA, 20 nt, Artificial Sequence
  Synthetic
uucgccaccgcccccccgcc

SEQ ID NO: 5963 - RNA, 20 nt, Artificial Sequence
  Synthetic
ccaccgcccccccgcccggc

SEQ ID NO: 5964 - RNA, 20 nt, Artificial Sequence
  Synthetic
caccgcccccccgcccggcc

SEQ ID NO: 5965 - RNA, 20 nt, Artificial Sequence
  Synthetic
accgcccccccgcccggccg

SEQ ID NO: 5966 - RNA, 20 nt, Artificial Sequence
  Synthetic
ccgcccccccgcccggccgg

SEQ ID NO: 5967 - RNA, 20 nt, Artificial Sequence
  Synthetic
uauguaccaugcucgauacc

SEQ ID NO: 5968 - RNA, 20 nt, Artificial Sequence
  Synthetic
gcccagcgaugugguggaau

SEQ ID NO: 5969 - RNA, 20 nt, Artificial Sequence
  Synthetic
cccagcgaugugguggaaug

SEQ ID NO: 5970 - RNA, 20 nt, Artificial Sequence
  Synthetic
ccagcgaugugguggaaugg

SEQ ID NO: 5971 - RNA, 20 nt, Artificial Sequence
  Synthetic
cagcgaugugguggaauggg

SEQ ID NO: 5972 - RNA, 20 nt, Artificial Sequence
  Synthetic
caaaucgacauucgcgccca

SEQ ID NO: 5973 - RNA, 20 nt, Artificial Sequence
  Synthetic
cgccgagcuacgggcgcggg

SEQ ID NO: 5974 - RNA, 17 nt, Artificial Sequence
  Synthetic
guuugccgacaugaacg

SEQ ID NO: 5975 - RNA, 17 nt, Artificial Sequence
  Synthetic
gccgacaugaacgcgga

SEQ ID NO: 5976 - RNA, 17 nt, Artificial Sequence
  Synthetic
gccaccgcccccccgcc

SEQ ID NO: 5977 - RNA, 17 nt, Artificial Sequence
  Synthetic
ccgcccccccgcccggc

SEQ ID NO: 5978 - RNA, 17 nt, Artificial Sequence
  Synthetic
cgcccccccgcccggcc

SEQ ID NO: 5979 - RNA, 17 nt, Artificial Sequence
  Synthetic
gcccccccgcccggccg

SEQ ID NO: 5980 - RNA, 17 nt, Artificial Sequence
  Synthetic
cccccccgcccggccgg

SEQ ID NO: 5981 - RNA, 17 nt, Artificial Sequence
  Synthetic
guaccaugcucgauacc

SEQ ID NO: 5982 - RNA, 17 nt, Artificial Sequence
  Synthetic
cagcgaugugguggaau

SEQ ID NO: 5983 - RNA, 17 nt, Artificial Sequence
  Synthetic
agcgaugugguggaaug

SEQ ID NO: 5984 - RNA, 17 nt, Artificial Sequence
  Synthetic
gcgaugugguggaaugg

SEQ ID NO: 5985 - RNA, 17 nt, Artificial Sequence
  Synthetic
cgaugugguggaauggg

SEQ ID NO: 5986 - RNA, 17 nt, Artificial Sequence
  Synthetic
aucgacauucgcgccca

SEQ ID NO: 5987 - RNA, 17 nt, Artificial Sequence
  Synthetic
cgagcuacgggcgcggg

SEQ ID NO: 5988 - RNA, 20 nt, Artificial Sequence
  Synthetic
cccgcgcccguagcucggcg

SEQ ID NO: 5989 - RNA, 20 nt, Artificial Sequence
  Synthetic
aguagagcccgaggccgucg

SEQ ID NO: 5990 - RNA, 20 nt, Artificial Sequence
  Synthetic
gagcccgaggccgucgcggg

SEQ ID NO: 5991 - RNA, 20 nt, Artificial Sequence
  Synthetic
ccgaggccgucgcggguggc

SEQ ID NO: 5992 - RNA, 20 nt, Artificial Sequence
  Synthetic
cgcggguggccggaagcgua

SEQ ID NO: 5993 - RNA, 20 nt, Artificial Sequence
  Synthetic
gguggccggaagcguaggga

SEQ ID NO: 5994 - RNA, 20 nt, Artificial Sequence
  Synthetic
aaugucgauuugggugcguu

SEQ ID NO: 5995 - RNA, 20 nt, Artificial Sequence
  Synthetic
augucgauuugggugcguuc

SEQ ID NO: 5996 - RNA, 20 nt, Artificial Sequence
  Synthetic
ugucgauuugggugcguucg

SEQ ID NO: 5997 - RNA, 20 nt, Artificial Sequence
  Synthetic
ccccauuccaccacaucgcu

SEQ ID NO: 5998 - RNA, 20 nt, Artificial Sequence
  Synthetic
caucgcugggcagcguugau

SEQ ID NO: 5999 - RNA, 20 nt, Artificial Sequence
  Synthetic
uugauaggaauuuacacucc

SEQ ID NO: 6000 - RNA, 20 nt, Artificial Sequence
  Synthetic
ggaauuuacacucccgguac

SEQ ID NO: 6001 - RNA, 20 nt, Artificial Sequence
  Synthetic
uuuacacucccgguacaggu

SEQ ID NO: 6002 - RNA, 20 nt, Artificial Sequence
  Synthetic
agcccaagucgucgaggaga

SEQ ID NO: 6003 - RNA, 20 nt, Artificial Sequence
  Synthetic
gaggagacgguuaaagaggg

SEQ ID NO: 6004 - RNA, 20 nt, Artificial Sequence
  Synthetic
gguuaaagagggcggcgggg

SEQ ID NO: 6005 - RNA, 20 nt, Artificial Sequence
  Synthetic
aaagagggcggcggggggga

SEQ ID NO: 6006 - RNA, 20 nt, Artificial Sequence
  Synthetic
aagagggcggcgggggggac

SEQ ID NO: 6007 - RNA, 20 nt, Artificial Sequence
  Synthetic
ggcggcgggggggacgggca

SEQ ID NO: 6008 - RNA, 20 nt, Artificial Sequence
  Synthetic
gcggcgggggggacgggcau

SEQ ID NO: 6009 - RNA, 20 nt, Artificial Sequence
  Synthetic
gcgggggggacgggcauggg

SEQ ID NO: 6010 - RNA, 20 nt, Artificial Sequence
  Synthetic
cgggggggacgggcaugggu

SEQ ID NO: 6011 - RNA, 20 nt, Artificial Sequence
  Synthetic
gggggggacgggcaugggug

SEQ ID NO: 6012 - RNA, 20 nt, Artificial Sequence
  Synthetic
ggggacgggcaugggugggg

SEQ ID NO: 6013 - RNA, 20 nt, Artificial Sequence
  Synthetic
gggacgggcaugggugggga

SEQ ID NO: 6014 - RNA, 20 nt, Artificial Sequence
  Synthetic
uggguggggagggcaugagc

SEQ ID NO: 6015 - RNA, 20 nt, Artificial Sequence
  Synthetic
ggguggggagggcaugagcu

SEQ ID NO: 6016 - RNA, 20 nt, Artificial Sequence
  Synthetic
gggagggcaugagcugggcc

SEQ ID NO: 6017 - RNA, 20 nt, Artificial Sequence
  Synthetic
gcaugagcugggccuggcuc

SEQ ID NO: 6018 - RNA, 20 nt, Artificial Sequence
  Synthetic
aggcgccccguugcguacag

SEQ ID NO: 6019 - RNA, 20 nt, Artificial Sequence
  Synthetic
ggcgccccguugcguacagc

SEQ ID NO: 6020 - RNA, 20 nt, Artificial Sequence
  Synthetic
gcguacagcgggggggccgc

SEQ ID NO: 6021 - RNA, 20 nt, Artificial Sequence
  Synthetic
cgggguguuuuugggacccc

SEQ ID NO: 6022 - RNA, 20 nt, Artificial Sequence
  Synthetic
uuuugggacccccggccggg

SEQ ID NO: 6023 - RNA, 20 nt, Artificial Sequence
  Synthetic
uuugggacccccggccgggc

SEQ ID NO: 6024 - RNA, 20 nt, Artificial Sequence
  Synthetic
uugggacccccggccgggcg

SEQ ID NO: 6025 - RNA, 20 nt, Artificial Sequence
  Synthetic
ugggacccccggccgggcgg

SEQ ID NO: 6026 - RNA, 20 nt, Artificial Sequence
  Synthetic
gggacccccggccgggcggg

SEQ ID NO: 6027 - RNA, 20 nt, Artificial Sequence
  Synthetic
ggacccccggccgggcgggg

SEQ ID NO: 6028 - RNA, 20 nt, Artificial Sequence
  Synthetic
cccccggccgggcggggggg

SEQ ID NO: 6029 - RNA, 20 nt, Artificial Sequence
  Synthetic
ccggccgggcgggggggcgg

SEQ ID NO: 6030 - RNA, 20 nt, Artificial Sequence
  Synthetic
agcgccguccgcguucaugu

SEQ ID NO: 6031 - RNA, 17 nt, Artificial Sequence
  Synthetic
gcgcccguagcucggcg

SEQ ID NO: 6032 - RNA, 17 nt, Artificial Sequence
  Synthetic
agagcccgaggccgucg

SEQ ID NO: 6033 - RNA, 17 nt, Artificial Sequence
  Synthetic
cccgaggccgucgcggg

SEQ ID NO: 6034 - RNA, 17 nt, Artificial Sequence
  Synthetic
aggccgucgcggguggc

SEQ ID NO: 6035 - RNA, 17 nt, Artificial Sequence
  Synthetic
ggguggccggaagcgua

SEQ ID NO: 6036 - RNA, 17 nt, Artificial Sequence
  Synthetic
ggccggaagcguaggga

SEQ ID NO: 6037 - RNA, 17 nt, Artificial Sequence
  Synthetic
gucgauuugggugcguu

SEQ ID NO: 6038 - RNA, 17 nt, Artificial Sequence
  Synthetic
ucgauuugggugcguuc

SEQ ID NO: 6039 - RNA, 17 nt, Artificial Sequence
  Synthetic
cgauuugggugcguucg

SEQ ID NO: 6040 - RNA, 17 nt, Artificial Sequence
  Synthetic
cauuccaccacaucgcu

SEQ ID NO: 6041 - RNA, 17 nt, Artificial Sequence
  Synthetic
cgcugggcagcguugau

SEQ ID NO: 6042 - RNA, 17 nt, Artificial Sequence
  Synthetic
auaggaauuuacacucc

SEQ ID NO: 6043 - RNA, 17 nt, Artificial Sequence
  Synthetic
auuuacacucccgguac

SEQ ID NO: 6044 - RNA, 17 nt, Artificial Sequence
  Synthetic
acacucccgguacaggu

SEQ ID NO: 6045 - RNA, 17 nt, Artificial Sequence
  Synthetic
ccaagucgucgaggaga

SEQ ID NO: 6046 - RNA, 17 nt, Artificial Sequence
  Synthetic
gagacgguuaaagaggg

SEQ ID NO: 6047 - RNA, 17 nt, Artificial Sequence
  Synthetic
uaaagagggcggcgggg

SEQ ID NO: 6048 - RNA, 17 nt, Artificial Sequence
  Synthetic
gagggcggcggggggga

SEQ ID NO: 6049 - RNA, 17 nt, Artificial Sequence
  Synthetic
agggcggcgggggggac

SEQ ID NO: 6050 - RNA, 17 nt, Artificial Sequence
  Synthetic
ggcgggggggacgggca

SEQ ID NO: 6051 - RNA, 17 nt, Artificial Sequence
  Synthetic
gcgggggggacgggcau

SEQ ID NO: 6052 - RNA, 17 nt, Artificial Sequence
  Synthetic
ggggggacgggcauggg

SEQ ID NO: 6053 - RNA, 17 nt, Artificial Sequence
  Synthetic
gggggacgggcaugggu

SEQ ID NO: 6054 - RNA, 17 nt, Artificial Sequence
  Synthetic
ggggacgggcaugggug

SEQ ID NO: 6055 - RNA, 17 nt, Artificial Sequence
  Synthetic
gacgggcaugggugggg

SEQ ID NO: 6056 - RNA, 17 nt, Artificial Sequence
  Synthetic
acgggcaugggugggga

SEQ ID NO: 6057 - RNA, 17 nt, Artificial Sequence
  Synthetic
guggggagggcaugagc

SEQ ID NO: 6058 - RNA, 17 nt, Artificial Sequence
  Synthetic
uggggagggcaugagcu

SEQ ID NO: 6059 - RNA, 17 nt, Artificial Sequence
  Synthetic
agggcaugagcugggcc

SEQ ID NO: 6060 - RNA, 17 nt, Artificial Sequence
  Synthetic
ugagcugggccuggcuc

SEQ ID NO: 6061 - RNA, 17 nt, Artificial Sequence
  Synthetic
cgccccguugcguacag

SEQ ID NO: 6062 - RNA, 17 nt, Artificial Sequence
  Synthetic
gccccguugcguacagc

SEQ ID NO: 6063 - RNA, 17 nt, Artificial Sequence
  Synthetic
uacagcgggggggccgc

SEQ ID NO: 6064 - RNA, 17 nt, Artificial Sequence
  Synthetic
gguguuuuugggacccc

SEQ ID NO: 6065 - RNA, 17 nt, Artificial Sequence
  Synthetic
ugggacccccggccggg

SEQ ID NO: 6066 - RNA, 17 nt, Artificial Sequence
  Synthetic
gggacccccggccgggc

SEQ ID NO: 6067 - RNA, 17 nt, Artificial Sequence
  Synthetic
ggacccccggccgggcg

SEQ ID NO: 6068 - RNA, 17 nt, Artificial Sequence
  Synthetic
gacccccggccgggcgg

SEQ ID NO: 6069 - RNA, 17 nt, Artificial Sequence
  Synthetic
acccccggccgggcggg

SEQ ID NO: 6070 - RNA, 17 nt, Artificial Sequence
  Synthetic
cccccggccgggcgggg

SEQ ID NO: 6071 - RNA, 17 nt, Artificial Sequence
  Synthetic
ccggccgggcggggggg

SEQ ID NO: 6072 - RNA, 17 nt, Artificial Sequence
  Synthetic
gccgggcgggggggcgg

SEQ ID NO: 6073 - RNA, 17 nt, Artificial Sequence
  Synthetic
gccguccgcguucaugu

SEQ ID NO: 6074 - RNA, 20 nt, Artificial Sequence
  Synthetic
cguguuggccaacuucugcu

SEQ ID NO: 6075 - RNA, 20 nt, Artificial Sequence
  Synthetic
acuucugcucggcccuguac

SEQ ID NO: 6076 - RNA, 20 nt, Artificial Sequence
  Synthetic
gguaccugcgcgccagcguc

SEQ ID NO: 6077 - RNA, 20 nt, Artificial Sequence
  Synthetic
cguccggcagcugcaccgcc

SEQ ID NO: 6078 - RNA, 20 nt, Artificial Sequence
  Synthetic
caccgccaggcgcacaugcg

SEQ ID NO: 6079 - RNA, 20 nt, Artificial Sequence
  Synthetic
gcgcggacgcgaucgcgacc

SEQ ID NO: 6080 - RNA, 20 nt, Artificial Sequence
  Synthetic
cgcggacgcgaucgcgaccu

SEQ ID NO: 6081 - RNA, 20 nt, Artificial Sequence
  Synthetic
aaugcugcgcgccacgaucg

SEQ ID NO: 6082 - RNA, 20 nt, Artificial Sequence
  Synthetic
ugcgcgccacgaucgcggac

SEQ ID NO: 6083 - RNA, 20 nt, Artificial Sequence
  Synthetic
cuaccgagagaccgcucguc

SEQ ID NO: 6084 - RNA, 20 nt, Artificial Sequence
  Synthetic
uuuugacccgcgagauccua

SEQ ID NO: 6085 - RNA, 20 nt, Artificial Sequence
  Synthetic
uuugacccgcgagauccuau

SEQ ID NO: 6086 - RNA, 20 nt, Artificial Sequence
  Synthetic
cguacgccgagcagaugaug

SEQ ID NO: 6087 - RNA, 20 nt, Artificial Sequence
  Synthetic
ugacugccucuguugcgacc

SEQ ID NO: 6088 - RNA, 20 nt, Artificial Sequence
  Synthetic
ucuguugcgaccuggagagc

SEQ ID NO: 6089 - RNA, 20 nt, Artificial Sequence
  Synthetic
ccuggagagcuggcgucagu

SEQ ID NO: 6090 - RNA, 20 nt, Artificial Sequence
  Synthetic
ggagagcuggcgucaguugg

SEQ ID NO: 6091 - RNA, 20 nt, Artificial Sequence
  Synthetic
gagagcuggcgucaguuggc

SEQ ID NO: 6092 - RNA, 20 nt, Artificial Sequence
  Synthetic
cagcccuucauguucgucaa

SEQ ID NO: 6093 - RNA, 20 nt, Artificial Sequence
  Synthetic
ucaacggagcgcucaccguc

SEQ ID NO: 6094 - RNA, 20 nt, Artificial Sequence
  Synthetic
caacggagcgcucaccgucc

SEQ ID NO: 6095 - RNA, 20 nt, Artificial Sequence
  Synthetic
aacggagcgcucaccguccg

SEQ ID NO: 6096 - RNA, 20 nt, Artificial Sequence
  Synthetic
cguccggggagugccaaucg

SEQ ID NO: 6097 - RNA, 20 nt, Artificial Sequence
  Synthetic
gagugccaaucgaggcccgc

SEQ ID NO: 6098 - RNA, 20 nt, Artificial Sequence
  Synthetic
caaucgaggcccgccggcug

SEQ ID NO: 6099 - RNA, 20 nt, Artificial Sequence
  Synthetic
aaucgaggcccgccggcugc

SEQ ID NO: 6100 - RNA, 20 nt, Artificial Sequence
  Synthetic
cgagcaccuuaaccucccgc

SEQ ID NO: 6101 - RNA, 20 nt, Artificial Sequence
  Synthetic
ccucccgcuggugcgcagcg

SEQ ID NO: 6102 - RNA, 20 nt, Artificial Sequence
  Synthetic
gcuggugcgcagcgcggcua

SEQ ID NO: 6103 - RNA, 20 nt, Artificial Sequence
  Synthetic
ggugcgcagcgcggcuacgg

SEQ ID NO: 6104 - RNA, 20 nt, Artificial Sequence
  Synthetic
agcgcggcuacggaggagcc

SEQ ID NO: 6105 - RNA, 20 nt, Artificial Sequence
  Synthetic
gcgcggcuacggaggagcca

SEQ ID NO: 6106 - RNA, 20 nt, Artificial Sequence
  Synthetic
cgcggcuacggaggagccag

SEQ ID NO: 6107 - RNA, 20 nt, Artificial Sequence
  Synthetic
acgaccccucccacccugca

SEQ ID NO: 6108 - RNA, 20 nt, Artificial Sequence
  Synthetic
ucccacccugcauggcaacc

SEQ ID NO: 6109 - RNA, 20 nt, Artificial Sequence
  Synthetic
ggcaaccaggcccgcgccuc

SEQ ID NO: 6110 - RNA, 20 nt, Artificial Sequence
  Synthetic
gcaaccaggcccgcgccucu

SEQ ID NO: 6111 - RNA, 20 nt, Artificial Sequence
  Synthetic
ccgcgccucuggguacuuua

SEQ ID NO: 6112 - RNA, 20 nt, Artificial Sequence
  Synthetic
gguacuuuaugguguugauu

SEQ ID NO: 6113 - RNA, 20 nt, Artificial Sequence
  Synthetic
guacuuuaugguguugauuc

SEQ ID NO: 6114 - RNA, 20 nt, Artificial Sequence
  Synthetic
gguguugauucgggcgaagu

SEQ ID NO: 6115 - RNA, 20 nt, Artificial Sequence
  Synthetic
cuucacgaccucgcccuccg

SEQ ID NO: 6116 - RNA, 20 nt, Artificial Sequence
  Synthetic
cacgaccucgcccuccgagg

SEQ ID NO: 6117 - RNA, 20 nt, Artificial Sequence
  Synthetic
cgcccuccgaggcggucaug

SEQ ID NO: 6118 - RNA, 20 nt, Artificial Sequence
  Synthetic
gcccuccgaggcggucaugc

SEQ ID NO: 6119 - RNA, 20 nt, Artificial Sequence
  Synthetic
gcgcguacgaaaaacaauua

SEQ ID NO: 6120 - RNA, 20 nt, Artificial Sequence
  Synthetic
cgcguacgaaaaacaauuac

SEQ ID NO: 6121 - RNA, 20 nt, Artificial Sequence
  Synthetic
caauuacgggucuaccaucg

SEQ ID NO: 6122 - RNA, 20 nt, Artificial Sequence
  Synthetic
aauuacgggucuaccaucga

SEQ ID NO: 6123 - RNA, 20 nt, Artificial Sequence
  Synthetic
cgagggccugcucgaucucc

SEQ ID NO: 6124 - RNA, 20 nt, Artificial Sequence
  Synthetic
ggacgacgacgcccccgaag

SEQ ID NO: 6125 - RNA, 20 nt, Artificial Sequence
  Synthetic
cgacgacgcccccgaagagg

SEQ ID NO: 6126 - RNA, 20 nt, Artificial Sequence
  Synthetic
gacgacgcccccgaagaggc

SEQ ID NO: 6127 - RNA, 20 nt, Artificial Sequence
  Synthetic
acgacgcccccgaagaggcg

SEQ ID NO: 6128 - RNA, 20 nt, Artificial Sequence
  Synthetic
cgcccccgaagaggcggggc

SEQ ID NO: 6129 - RNA, 20 nt, Artificial Sequence
  Synthetic
ccccgaagaggcggggcugg

SEQ ID NO: 6130 - RNA, 20 nt, Artificial Sequence
  Synthetic
gcgccuguccuuucuccccg

SEQ ID NO: 6131 - RNA, 20 nt, Artificial Sequence
  Synthetic
cgccuguccuuucuccccgc

SEQ ID NO: 6132 - RNA, 20 nt, Artificial Sequence
  Synthetic
acacacgcgcagacugucga

SEQ ID NO: 6133 - RNA, 20 nt, Artificial Sequence
  Synthetic
ccccccgaccgaugucagcc

SEQ ID NO: 6134 - RNA, 20 nt, Artificial Sequence
  Synthetic
cccccgaccgaugucagccu

SEQ ID NO: 6135 - RNA, 20 nt, Artificial Sequence
  Synthetic
ccccgaccgaugucagccug

SEQ ID NO: 6136 - RNA, 20 nt, Artificial Sequence
  Synthetic
cccgaccgaugucagccugg

SEQ ID NO: 6137 - RNA, 20 nt, Artificial Sequence
  Synthetic
ggggacgagcuccacuuaga

SEQ ID NO: 6138 - RNA, 20 nt, Artificial Sequence
  Synthetic
cgagcuccacuuagacggcg

SEQ ID NO: 6139 - RNA, 20 nt, Artificial Sequence
  Synthetic
ccacuuagacggcgaggacg

SEQ ID NO: 6140 - RNA, 20 nt, Artificial Sequence
  Synthetic
agacggcgaggacguggcga

SEQ ID NO: 6141 - RNA, 20 nt, Artificial Sequence
  Synthetic
cgcgcuagacgauuucgauc

SEQ ID NO: 6142 - RNA, 20 nt, Artificial Sequence
  Synthetic
cgauuucgaucuggacaugu

SEQ ID NO: 6143 - RNA, 20 nt, Artificial Sequence
  Synthetic
gauuucgaucuggacauguu

SEQ ID NO: 6144 - RNA, 20 nt, Artificial Sequence
  Synthetic
auuucgaucuggacauguug

SEQ ID NO: 6145 - RNA, 20 nt, Artificial Sequence
  Synthetic
uuucgaucuggacauguugg

SEQ ID NO: 6146 - RNA, 20 nt, Artificial Sequence
  Synthetic
gaucuggacauguuggggga

SEQ ID NO: 6147 - RNA, 20 nt, Artificial Sequence
  Synthetic
aucuggacauguugggggac

SEQ ID NO: 6148 - RNA, 20 nt, Artificial Sequence
  Synthetic
ucuggacauguugggggacg

SEQ ID NO: 6149 - RNA, 20 nt, Artificial Sequence
  Synthetic
guugggggacggggauuccc

SEQ ID NO: 6150 - RNA, 20 nt, Artificial Sequence
  Synthetic
uugggggacggggauucccc

SEQ ID NO: 6151 - RNA, 20 nt, Artificial Sequence
  Synthetic
ugggggacggggauuccccg

SEQ ID NO: 6152 - RNA, 20 nt, Artificial Sequence
  Synthetic
ggacggggauuccccggggc

SEQ ID NO: 6153 - RNA, 20 nt, Artificial Sequence
  Synthetic
gacggggauuccccggggcc

SEQ ID NO: 6154 - RNA, 20 nt, Artificial Sequence
  Synthetic
ccccacgacuccgcccccua

SEQ ID NO: 6155 - RNA, 20 nt, Artificial Sequence
  Synthetic
cuccgcccccuacggcgcuc

SEQ ID NO: 6156 - RNA, 20 nt, Artificial Sequence
  Synthetic
ccccuacggcgcucuggaua

SEQ ID NO: 6157 - RNA, 20 nt, Artificial Sequence
  Synthetic
cagauguuuaccgaugcccu

SEQ ID NO: 6158 - RNA, 20 nt, Artificial Sequence
  Synthetic
gcccuuggaauugacgagua

SEQ ID NO: 6159 - RNA, 20 nt, Artificial Sequence
  Synthetic
cuuggaauugacgaguacgg

SEQ ID NO: 6160 - RNA, 20 nt, Artificial Sequence
  Synthetic
uuggaauugacgaguacggu

SEQ ID NO: 6161 - RNA, 20 nt, Artificial Sequence
  Synthetic
caccguacucgucaauucca

SEQ ID NO: 6162 - RNA, 20 nt, Artificial Sequence
  Synthetic
accguacucgucaauuccaa

SEQ ID NO: 6163 - RNA, 20 nt, Artificial Sequence
  Synthetic
cucgucaauuccaagggcau

SEQ ID NO: 6164 - RNA, 20 nt, Artificial Sequence
  Synthetic
caucugcucaaacucgaagu

SEQ ID NO: 6165 - RNA, 20 nt, Artificial Sequence
  Synthetic
ggccauauccagagcgccgu

SEQ ID NO: 6166 - RNA, 20 nt, Artificial Sequence
  Synthetic
gccauauccagagcgccgua

SEQ ID NO: 6167 - RNA, 20 nt, Artificial Sequence
  Synthetic
ccauauccagagcgccguag

SEQ ID NO: 6168 - RNA, 20 nt, Artificial Sequence
  Synthetic
cauauccagagcgccguagg

SEQ ID NO: 6169 - RNA, 20 nt, Artificial Sequence
  Synthetic
auccagagcgccguaggggg

SEQ ID NO: 6170 - RNA, 20 nt, Artificial Sequence
  Synthetic
cgccguagggggcggagucg

SEQ ID NO: 6171 - RNA, 20 nt, Artificial Sequence
  Synthetic
gccguagggggcggagucgu

SEQ ID NO: 6172 - RNA, 20 nt, Artificial Sequence
  Synthetic
ccguagggggcggagucgug

SEQ ID NO: 6173 - RNA, 20 nt, Artificial Sequence
  Synthetic
cguagggggcggagucgugg

SEQ ID NO: 6174 - RNA, 20 nt, Artificial Sequence
  Synthetic
guagggggcggagucguggg

SEQ ID NO: 6175 - RNA, 20 nt, Artificial Sequence
  Synthetic
gagucgugggggguaaaucc

SEQ ID NO: 6176 - RNA, 20 nt, Artificial Sequence
  Synthetic
ugggggguaaaucccggccc

SEQ ID NO: 6177 - RNA, 20 nt, Artificial Sequence
  Synthetic
gggggguaaaucccggcccc

SEQ ID NO: 6178 - RNA, 20 nt, Artificial Sequence
  Synthetic
ggggguaaaucccggccccg

SEQ ID NO: 6179 - RNA, 20 nt, Artificial Sequence
  Synthetic
aucgaaaucgucuagcgcgu

SEQ ID NO: 6180 - RNA, 20 nt, Artificial Sequence
  Synthetic
ccacguccucgccgucuaag

SEQ ID NO: 6181 - RNA, 20 nt, Artificial Sequence
  Synthetic
cuaaguggagcucguccccc

SEQ ID NO: 6182 - RNA, 20 nt, Artificial Sequence
  Synthetic
cucgucccccaggcugacau

SEQ ID NO: 6183 - RNA, 20 nt, Artificial Sequence
  Synthetic
ucccccaggcugacaucggu

SEQ ID NO: 6184 - RNA, 20 nt, Artificial Sequence
  Synthetic
cccccaggcugacaucgguc

SEQ ID NO: 6185 - RNA, 20 nt, Artificial Sequence
  Synthetic
ccccaggcugacaucggucg

SEQ ID NO: 6186 - RNA, 20 nt, Artificial Sequence
  Synthetic
cccaggcugacaucggucgg

SEQ ID NO: 6187 - RNA, 20 nt, Artificial Sequence
  Synthetic
ccaggcugacaucggucggg

SEQ ID NO: 6188 - RNA, 20 nt, Artificial Sequence
  Synthetic
caggcugacaucggucgggg

SEQ ID NO: 6189 - RNA, 20 nt, Artificial Sequence
  Synthetic
cagucugcgcgugugucccg

SEQ ID NO: 6190 - RNA, 20 nt, Artificial Sequence
  Synthetic
agucugcgcgugugucccgc

SEQ ID NO: 6191 - RNA, 20 nt, Artificial Sequence
  Synthetic
gucugcgcgugugucccgcg

SEQ ID NO: 6192 - RNA, 20 nt, Artificial Sequence
  Synthetic
cgugugucccgcggggagaa

SEQ ID NO: 6193 - RNA, 20 nt, Artificial Sequence
  Synthetic
gucccgcggggagaaaggac

SEQ ID NO: 6194 - RNA, 20 nt, Artificial Sequence
  Synthetic
gcggggagaaaggacaggcg

SEQ ID NO: 6195 - RNA, 20 nt, Artificial Sequence
  Synthetic
agccgccagccccgccucuu

SEQ ID NO: 6196 - RNA, 20 nt, Artificial Sequence
  Synthetic
gccgccagccccgccucuuc

SEQ ID NO: 6197 - RNA, 20 nt, Artificial Sequence
  Synthetic
ccgccagccccgccucuucg

SEQ ID NO: 6198 - RNA, 20 nt, Artificial Sequence
  Synthetic
cgccagccccgccucuucgg

SEQ ID NO: 6199 - RNA, 20 nt, Artificial Sequence
  Synthetic
ucuucgggggcgucgucguc

SEQ ID NO: 6200 - RNA, 20 nt, Artificial Sequence
  Synthetic
cuucgggggcgucgucgucc

SEQ ID NO: 6201 - RNA, 20 nt, Artificial Sequence
  Synthetic
cgucguccgggagaucgagc

SEQ ID NO: 6202 - RNA, 20 nt, Artificial Sequence
  Synthetic
gagaucgagcaggcccucga

SEQ ID NO: 6203 - RNA, 20 nt, Artificial Sequence
  Synthetic
aauuguuuuucguacgcgcg

SEQ ID NO: 6204 - RNA, 20 nt, Artificial Sequence
  Synthetic
guguucccgcaugaccgccu

SEQ ID NO: 6205 - RNA, 20 nt, Artificial Sequence
  Synthetic
uucccgcaugaccgccucgg

SEQ ID NO: 6206 - RNA, 20 nt, Artificial Sequence
  Synthetic
ucccgcaugaccgccucgga

SEQ ID NO: 6207 - RNA, 20 nt, Artificial Sequence
  Synthetic
caugaccgccucggagggcg

SEQ ID NO: 6208 - RNA, 20 nt, Artificial Sequence
  Synthetic
ggagggcgaggucgugaagc

SEQ ID NO: 6209 - RNA, 20 nt, Artificial Sequence
  Synthetic
caacaccauaaaguacccag

SEQ ID NO: 6210 - RNA, 20 nt, Artificial Sequence
  Synthetic
ccauaaaguacccagaggcg

SEQ ID NO: 6211 - RNA, 20 nt, Artificial Sequence
  Synthetic
cauaaaguacccagaggcgc

SEQ ID NO: 6212 - RNA, 20 nt, Artificial Sequence
  Synthetic
aguacccagaggcgcgggcc

SEQ ID NO: 6213 - RNA, 20 nt, Artificial Sequence
  Synthetic
cgcgggccugguugccaugc

SEQ ID NO: 6214 - RNA, 20 nt, Artificial Sequence
  Synthetic
gcgggccugguugccaugca

SEQ ID NO: 6215 - RNA, 20 nt, Artificial Sequence
  Synthetic
ggccugguugccaugcaggg

SEQ ID NO: 6216 - RNA, 20 nt, Artificial Sequence
  Synthetic
gccugguugccaugcagggu

SEQ ID NO: 6217 - RNA, 20 nt, Artificial Sequence
  Synthetic
ugguugccaugcaggguggg

SEQ ID NO: 6218 - RNA, 20 nt, Artificial Sequence
  Synthetic
gguugccaugcaggguggga

SEQ ID NO: 6219 - RNA, 20 nt, Artificial Sequence
  Synthetic
guugccaugcagggugggag

SEQ ID NO: 6220 - RNA, 20 nt, Artificial Sequence
  Synthetic
agggugggaggggucgucaa

SEQ ID NO: 6221 - RNA, 20 nt, Artificial Sequence
  Synthetic
ggggucgucaacggcgcccc

SEQ ID NO: 6222 - RNA, 20 nt, Artificial Sequence
  Synthetic
guagccgcgcugcgcaccag

SEQ ID NO: 6223 - RNA, 20 nt, Artificial Sequence
  Synthetic
uagccgcgcugcgcaccagc

SEQ ID NO: 6224 - RNA, 20 nt, Artificial Sequence
  Synthetic
ccgcgcugcgcaccagcggg

SEQ ID NO: 6225 - RNA, 20 nt, Artificial Sequence
  Synthetic
ugcgcaccagcgggagguua

SEQ ID NO: 6226 - RNA, 20 nt, Artificial Sequence
  Synthetic
gguuaaggugcucgcgaaug

SEQ ID NO: 6227 - RNA, 20 nt, Artificial Sequence
  Synthetic
ugugguuuagcucccgcagc

SEQ ID NO: 6228 - RNA, 20 nt, Artificial Sequence
  Synthetic
gguuuagcucccgcagccgg

SEQ ID NO: 6229 - RNA, 20 nt, Artificial Sequence
  Synthetic
guuuagcucccgcagccggc

SEQ ID NO: 6230 - RNA, 20 nt, Artificial Sequence
  Synthetic
cgcagccggcgggccucgau

SEQ ID NO: 6231 - RNA, 20 nt, Artificial Sequence
  Synthetic
gggccucgauuggcacuccc

SEQ ID NO: 6232 - RNA, 20 nt, Artificial Sequence
  Synthetic
cucgauuggcacuccccgga

SEQ ID NO: 6233 - RNA, 20 nt, Artificial Sequence
  Synthetic
cgcuccguugacgaacauga

SEQ ID NO: 6234 - RNA, 20 nt, Artificial Sequence
  Synthetic
gcuccguugacgaacaugaa

SEQ ID NO: 6235 - RNA, 20 nt, Artificial Sequence
  Synthetic
cguugacgaacaugaagggc

SEQ ID NO: 6236 - RNA, 20 nt, Artificial Sequence
  Synthetic
ccaacugacgccagcucucc

SEQ ID NO: 6237 - RNA, 20 nt, Artificial Sequence
  Synthetic
agcucuccaggucgcaacag

SEQ ID NO: 6238 - RNA, 20 nt, Artificial Sequence
  Synthetic
cgcaacagaggcagucaaac

SEQ ID NO: 6239 - RNA, 20 nt, Artificial Sequence
  Synthetic
acagaggcagucaaacaggu

SEQ ID NO: 6240 - RNA, 20 nt, Artificial Sequence
  Synthetic
cagaggcagucaaacagguc

SEQ ID NO: 6241 - RNA, 20 nt, Artificial Sequence
  Synthetic
gucgggccgcaucaucugcu

SEQ ID NO: 6242 - RNA, 20 nt, Artificial Sequence
  Synthetic
caucaucugcucggcguacg

SEQ ID NO: 6243 - RNA, 20 nt, Artificial Sequence
  Synthetic
gcucggcguacgcggcccau

SEQ ID NO: 6244 - RNA, 20 nt, Artificial Sequence
  Synthetic
acgcggcccauaggaucucg

SEQ ID NO: 6245 - RNA, 20 nt, Artificial Sequence
  Synthetic
cgcggcccauaggaucucgc

SEQ ID NO: 6246 - RNA, 20 nt, Artificial Sequence
  Synthetic
caaaacacgcgccagacgag

SEQ ID NO: 6247 - RNA, 20 nt, Artificial Sequence
  Synthetic
gcgccagacgagcggucucu

SEQ ID NO: 6248 - RNA, 20 nt, Artificial Sequence
  Synthetic
guaguaccuguccgcgaucg

SEQ ID NO: 6249 - RNA, 20 nt, Artificial Sequence
  Synthetic
uggcgcgcagcauuucuccc

SEQ ID NO: 6250 - RNA, 20 nt, Artificial Sequence
  Synthetic
cgcguccgcgcaugugcgcc

SEQ ID NO: 6251 - RNA, 20 nt, Artificial Sequence
  Synthetic
guccgcgcaugugcgccugg

SEQ ID NO: 6252 - RNA, 20 nt, Artificial Sequence
  Synthetic
gcgccuggcggugcagcugc

SEQ ID NO: 6253 - RNA, 20 nt, Artificial Sequence
  Synthetic
gcggugcagcugccggacgc

SEQ ID NO: 6254 - RNA, 20 nt, Artificial Sequence
  Synthetic
gcugccggacgcuggcgcgc

SEQ ID NO: 6255 - RNA, 20 nt, Artificial Sequence
  Synthetic
ggacgcuggcgcgcagguac

SEQ ID NO: 6256 - RNA, 20 nt, Artificial Sequence
  Synthetic
uggcgcgcagguaccgguac

SEQ ID NO: 6257 - RNA, 20 nt, Artificial Sequence
  Synthetic
ggcgcgcagguaccgguaca

SEQ ID NO: 6258 - RNA, 20 nt, Artificial Sequence
  Synthetic
guacagggccgagcagaagu

SEQ ID NO: 6259 - RNA, 20 nt, Artificial Sequence
  Synthetic
cgagcagaaguuggccaaca

SEQ ID NO: 6260 - RNA, 17 nt, Artificial Sequence
  Synthetic
guuggccaacuucugcu

SEQ ID NO: 6261 - RNA, 17 nt, Artificial Sequence
  Synthetic
ucugcucggcccuguac

SEQ ID NO: 6262 - RNA, 17 nt, Artificial Sequence
  Synthetic
accugcgcgccagcguc

SEQ ID NO: 6263 - RNA, 17 nt, Artificial Sequence
  Synthetic
ccggcagcugcaccgcc

SEQ ID NO: 6264 - RNA, 17 nt, Artificial Sequence
  Synthetic
cgccaggcgcacaugcg

SEQ ID NO: 6265 - RNA, 17 nt, Artificial Sequence
  Synthetic
cggacgcgaucgcgacc

SEQ ID NO: 6266 - RNA, 17 nt, Artificial Sequence
  Synthetic
ggacgcgaucgcgaccu

SEQ ID NO: 6267 - RNA, 17 nt, Artificial Sequence
  Synthetic
gcugcgcgccacgaucg

SEQ ID NO: 6268 - RNA, 17 nt, Artificial Sequence
  Synthetic
gcgccacgaucgcggac

SEQ ID NO: 6269 - RNA, 17 nt, Artificial Sequence
  Synthetic
ccgagagaccgcucguc

SEQ ID NO: 6270 - RNA, 17 nt, Artificial Sequence
  Synthetic
ugacccgcgagauccua

SEQ ID NO: 6271 - RNA, 17 nt, Artificial Sequence
  Synthetic
gacccgcgagauccuau

SEQ ID NO: 6272 - RNA, 17 nt, Artificial Sequence
  Synthetic
acgccgagcagaugaug

SEQ ID NO: 6273 - RNA, 17 nt, Artificial Sequence
  Synthetic
cugccucuguugcgacc

SEQ ID NO: 6274 - RNA, 17 nt, Artificial Sequence
  Synthetic
guugcgaccuggagagc

SEQ ID NO: 6275 - RNA, 17 nt, Artificial Sequence
  Synthetic
ggagagcuggcgucagu

SEQ ID NO: 6276 - RNA, 17 nt, Artificial Sequence
  Synthetic
gagcuggcgucaguugg

SEQ ID NO: 6277 - RNA, 17 nt, Artificial Sequence
  Synthetic
agcuggcgucaguuggc

SEQ ID NO: 6278 - RNA, 17 nt, Artificial Sequence
  Synthetic
cccuucauguucgucaa

SEQ ID NO: 6279 - RNA, 17 nt, Artificial Sequence
  Synthetic
acggagcgcucaccguc

SEQ ID NO: 6280 - RNA, 17 nt, Artificial Sequence
  Synthetic
cggagcgcucaccgucc

SEQ ID NO: 6281 - RNA, 17 nt, Artificial Sequence
  Synthetic
ggagcgcucaccguccg

SEQ ID NO: 6282 - RNA, 17 nt, Artificial Sequence
  Synthetic
ccggggagugccaaucg

SEQ ID NO: 6283 - RNA, 17 nt, Artificial Sequence
  Synthetic
ugccaaucgaggcccgc

SEQ ID NO: 6284 - RNA, 17 nt, Artificial Sequence
  Synthetic
ucgaggcccgccggcug

SEQ ID NO: 6285 - RNA, 17 nt, Artificial Sequence
  Synthetic
cgaggcccgccggcugc

SEQ ID NO: 6286 - RNA, 17 nt, Artificial Sequence
  Synthetic
gcaccuuaaccucccgc

SEQ ID NO: 6287 - RNA, 17 nt, Artificial Sequence
  Synthetic
cccgcuggugcgcagcg

SEQ ID NO: 6288 - RNA, 17 nt, Artificial Sequence
  Synthetic
ggugcgcagcgcggcua

SEQ ID NO: 6289 - RNA, 17 nt, Artificial Sequence
  Synthetic
gcgcagcgcggcuacgg

SEQ ID NO: 6290 - RNA, 17 nt, Artificial Sequence
  Synthetic
gcggcuacggaggagcc

SEQ ID NO: 6291 - RNA, 17 nt, Artificial Sequence
  Synthetic
cggcuacggaggagcca

SEQ ID NO: 6292 - RNA, 17 nt, Artificial Sequence
  Synthetic
ggcuacggaggagccag

SEQ ID NO: 6293 - RNA, 17 nt, Artificial Sequence
  Synthetic
accccucccacccugca

SEQ ID NO: 6294 - RNA, 17 nt, Artificial Sequence
  Synthetic
cacccugcauggcaacc

SEQ ID NO: 6295 - RNA, 17 nt, Artificial Sequence
  Synthetic
aaccaggcccgcgccuc

SEQ ID NO: 6296 - RNA, 17 nt, Artificial Sequence
  Synthetic
accaggcccgcgccucu

SEQ ID NO: 6297 - RNA, 17 nt, Artificial Sequence
  Synthetic
cgccucuggguacuuua

SEQ ID NO: 6298 - RNA, 17 nt, Artificial Sequence
  Synthetic
acuuuaugguguugauu

SEQ ID NO: 6299 - RNA, 17 nt, Artificial Sequence
  Synthetic
cuuuaugguguugauuc

SEQ ID NO: 6300 - RNA, 17 nt, Artificial Sequence
  Synthetic
guugauucgggcgaagu

SEQ ID NO: 6301 - RNA, 17 nt, Artificial Sequence
  Synthetic
cacgaccucgcccuccg

SEQ ID NO: 6302 - RNA, 17 nt, Artificial Sequence
  Synthetic
gaccucgcccuccgagg

SEQ ID NO: 6303 - RNA, 17 nt, Artificial Sequence
  Synthetic
ccuccgaggcggucaug

SEQ ID NO: 6304 - RNA, 17 nt, Artificial Sequence
  Synthetic
cuccgaggcggucaugc

SEQ ID NO: 6305 - RNA, 17 nt, Artificial Sequence
  Synthetic
cguacgaaaaacaauua

SEQ ID NO: 6306 - RNA, 17 nt, Artificial Sequence
  Synthetic
guacgaaaaacaauuac

SEQ ID NO: 6307 - RNA, 17 nt, Artificial Sequence
  Synthetic
uuacgggucuaccaucg

SEQ ID NO: 6308 - RNA, 17 nt, Artificial Sequence
  Synthetic
uacgggucuaccaucga

SEQ ID NO: 6309 - RNA, 17 nt, Artificial Sequence
  Synthetic
gggccugcucgaucucc

SEQ ID NO: 6310 - RNA, 17 nt, Artificial Sequence
  Synthetic
cgacgacgcccccgaag

SEQ ID NO: 6311 - RNA, 17 nt, Artificial Sequence
  Synthetic
cgacgcccccgaagagg

SEQ ID NO: 6312 - RNA, 17 nt, Artificial Sequence
  Synthetic
gacgcccccgaagaggc

SEQ ID NO: 6313 - RNA, 17 nt, Artificial Sequence
  Synthetic
acgcccccgaagaggcg

SEQ ID NO: 6314 - RNA, 17 nt, Artificial Sequence
  Synthetic
ccccgaagaggcggggc

SEQ ID NO: 6315 - RNA, 17 nt, Artificial Sequence
  Synthetic
cgaagaggcggggcugg

SEQ ID NO: 6316 - RNA, 17 nt, Artificial Sequence
  Synthetic
ccuguccuuucuccccg

SEQ ID NO: 6317 - RNA, 17 nt, Artificial Sequence
  Synthetic
cuguccuuucuccccgc

SEQ ID NO: 6318 - RNA, 17 nt, Artificial Sequence
  Synthetic
cacgcgcagacugucga

SEQ ID NO: 6319 - RNA, 17 nt, Artificial Sequence
  Synthetic
cccgaccgaugucagcc

SEQ ID NO: 6320 - RNA, 17 nt, Artificial Sequence
  Synthetic
ccgaccgaugucagccu

SEQ ID NO: 6321 - RNA, 17 nt, Artificial Sequence
  Synthetic
cgaccgaugucagccug

SEQ ID NO: 6322 - RNA, 17 nt, Artificial Sequence
  Synthetic
gaccgaugucagccugg

SEQ ID NO: 6323 - RNA, 17 nt, Artificial Sequence
  Synthetic
gacgagcuccacuuaga

SEQ ID NO: 6324 - RNA, 17 nt, Artificial Sequence
  Synthetic
gcuccacuuagacggcg

SEQ ID NO: 6325 - RNA, 17 nt, Artificial Sequence
  Synthetic
cuuagacggcgaggacg

SEQ ID NO: 6326 - RNA, 17 nt, Artificial Sequence
  Synthetic
cggcgaggacguggcga

SEQ ID NO: 6327 - RNA, 17 nt, Artificial Sequence
  Synthetic
gcuagacgauuucgauc

SEQ ID NO: 6328 - RNA, 17 nt, Artificial Sequence
  Synthetic
uuucgaucuggacaugu

SEQ ID NO: 6329 - RNA, 17 nt, Artificial Sequence
  Synthetic
uucgaucuggacauguu

SEQ ID NO: 6330 - RNA, 17 nt, Artificial Sequence
  Synthetic
ucgaucuggacauguug

SEQ ID NO: 6331 - RNA, 17 nt, Artificial Sequence
  Synthetic
cgaucuggacauguugg

SEQ ID NO: 6332 - RNA, 17 nt, Artificial Sequence
  Synthetic
cuggacauguuggggga

SEQ ID NO: 6333 - RNA, 17 nt, Artificial Sequence
  Synthetic
uggacauguugggggac

SEQ ID NO: 6334 - RNA, 17 nt, Artificial Sequence
  Synthetic
ggacauguugggggacg

SEQ ID NO: 6335 - RNA, 17 nt, Artificial Sequence
  Synthetic
gggggacggggauuccc

SEQ ID NO: 6336 - RNA, 17 nt, Artificial Sequence
  Synthetic
ggggacggggauucccc

SEQ ID NO: 6337 - RNA, 17 nt, Artificial Sequence
  Synthetic
gggacggggauuccccg

SEQ ID NO: 6338 - RNA, 17 nt, Artificial Sequence
  Synthetic
cggggauuccccggggc

SEQ ID NO: 6339 - RNA, 17 nt, Artificial Sequence
  Synthetic
ggggauuccccggggcc

SEQ ID NO: 6340 - RNA, 17 nt, Artificial Sequence
  Synthetic
cacgacuccgcccccua

SEQ ID NO: 6341 - RNA, 17 nt, Artificial Sequence
  Synthetic
cgcccccuacggcgcuc

SEQ ID NO: 6342 - RNA, 17 nt, Artificial Sequence
  Synthetic
cuacggcgcucuggaua

SEQ ID NO: 6343 - RNA, 17 nt, Artificial Sequence
  Synthetic
auguuuaccgaugcccu

SEQ ID NO: 6344 - RNA, 17 nt, Artificial Sequence
  Synthetic
cuuggaauugacgagua

SEQ ID NO: 6345 - RNA, 17 nt, Artificial Sequence
  Synthetic
ggaauugacgaguacgg

SEQ ID NO: 6346 - RNA, 17 nt, Artificial Sequence
  Synthetic
gaauugacgaguacggu

SEQ ID NO: 6347 - RNA, 17 nt, Artificial Sequence
  Synthetic
cguacucgucaauucca

SEQ ID NO: 6348 - RNA, 17 nt, Artificial Sequence
  Synthetic
guacucgucaauuccaa

SEQ ID NO: 6349 - RNA, 17 nt, Artificial Sequence
  Synthetic
gucaauuccaagggcau

SEQ ID NO: 6350 - RNA, 17 nt, Artificial Sequence
  Synthetic
cugcucaaacucgaagu

SEQ ID NO: 6351 - RNA, 17 nt, Artificial Sequence
  Synthetic
cauauccagagcgccgu

SEQ ID NO: 6352 - RNA, 17 nt, Artificial Sequence
  Synthetic
auauccagagcgccgua

SEQ ID NO: 6353 - RNA, 17 nt, Artificial Sequence
  Synthetic
uauccagagcgccguag

SEQ ID NO: 6354 - RNA, 17 nt, Artificial Sequence
  Synthetic
auccagagcgccguagg

SEQ ID NO: 6355 - RNA, 17 nt, Artificial Sequence
  Synthetic
cagagcgccguaggggg

SEQ ID NO: 6356 - RNA, 17 nt, Artificial Sequence
  Synthetic
cguagggggcggagucg

SEQ ID NO: 6357 - RNA, 17 nt, Artificial Sequence
  Synthetic
guagggggcggagucgu

SEQ ID NO: 6358 - RNA, 17 nt, Artificial Sequence
  Synthetic
uagggggcggagucgug

SEQ ID NO: 6359 - RNA, 17 nt, Artificial Sequence
  Synthetic
agggggcggagucgugg

SEQ ID NO: 6360 - RNA, 17 nt, Artificial Sequence
  Synthetic
gggggcggagucguggg

SEQ ID NO: 6361 - RNA, 17 nt, Artificial Sequence
  Synthetic
ucgugggggguaaaucc

SEQ ID NO: 6362 - RNA, 17 nt, Artificial Sequence
  Synthetic
gggguaaaucccggccc

SEQ ID NO: 6363 - RNA, 17 nt, Artificial Sequence
  Synthetic
ggguaaaucccggcccc

SEQ ID NO: 6364 - RNA, 17 nt, Artificial Sequence
  Synthetic
gguaaaucccggccccg

SEQ ID NO: 6365 - RNA, 17 nt, Artificial Sequence
  Synthetic
gaaaucgucuagcgcgu

SEQ ID NO: 6366 - RNA, 17 nt, Artificial Sequence
  Synthetic
cguccucgccgucuaag

SEQ ID NO: 6367 - RNA, 17 nt, Artificial Sequence
  Synthetic
aguggagcucguccccc

SEQ ID NO: 6368 - RNA, 17 nt, Artificial Sequence
  Synthetic
gucccccaggcugacau

SEQ ID NO: 6369 - RNA, 17 nt, Artificial Sequence
  Synthetic
cccaggcugacaucggu

SEQ ID NO: 6370 - RNA, 17 nt, Artificial Sequence
  Synthetic
ccaggcugacaucgguc

SEQ ID NO: 6371 - RNA, 17 nt, Artificial Sequence
  Synthetic
caggcugacaucggucg

SEQ ID NO: 6372 - RNA, 17 nt, Artificial Sequence
  Synthetic
aggcugacaucggucgg

SEQ ID NO: 6373 - RNA, 17 nt, Artificial Sequence
  Synthetic
ggcugacaucggucggg

SEQ ID NO: 6374 - RNA, 17 nt, Artificial Sequence
  Synthetic
gcugacaucggucgggg

SEQ ID NO: 6375 - RNA, 17 nt, Artificial Sequence
  Synthetic
ucugcgcgugugucccg

SEQ ID NO: 6376 - RNA, 17 nt, Artificial Sequence
  Synthetic
cugcgcgugugucccgc

SEQ ID NO: 6377 - RNA, 17 nt, Artificial Sequence
  Synthetic
ugcgcgugugucccgcg

SEQ ID NO: 6378 - RNA, 17 nt, Artificial Sequence
  Synthetic
gugucccgcggggagaa

SEQ ID NO: 6379 - RNA, 17 nt, Artificial Sequence
  Synthetic
ccgcggggagaaaggac

SEQ ID NO: 6380 - RNA, 17 nt, Artificial Sequence
  Synthetic
gggagaaaggacaggcg

SEQ ID NO: 6381 - RNA, 17 nt, Artificial Sequence
  Synthetic
cgccagccccgccucuu

SEQ ID NO: 6382 - RNA, 17 nt, Artificial Sequence
  Synthetic
gccagccccgccucuuc

SEQ ID NO: 6383 - RNA, 17 nt, Artificial Sequence
  Synthetic
ccagccccgccucuucg

SEQ ID NO: 6384 - RNA, 17 nt, Artificial Sequence
  Synthetic
cagccccgccucuucgg

SEQ ID NO: 6385 - RNA, 17 nt, Artificial Sequence
  Synthetic
ucgggggcgucgucguc

SEQ ID NO: 6386 - RNA, 17 nt, Artificial Sequence
  Synthetic
cgggggcgucgucgucc

SEQ ID NO: 6387 - RNA, 17 nt, Artificial Sequence
  Synthetic
cguccgggagaucgagc

SEQ ID NO: 6388 - RNA, 17 nt, Artificial Sequence
  Synthetic
aucgagcaggcccucga

SEQ ID NO: 6389 - RNA, 17 nt, Artificial Sequence
  Synthetic
uguuuuucguacgcgcg

SEQ ID NO: 6390 - RNA, 17 nt, Artificial Sequence
  Synthetic
uucccgcaugaccgccu

SEQ ID NO: 6391 - RNA, 17 nt, Artificial Sequence
  Synthetic
ccgcaugaccgccucgg

SEQ ID NO: 6392 - RNA, 17 nt, Artificial Sequence
  Synthetic
cgcaugaccgccucgga

SEQ ID NO: 6393 - RNA, 17 nt, Artificial Sequence
  Synthetic
gaccgccucggagggcg

SEQ ID NO: 6394 - RNA, 17 nt, Artificial Sequence
  Synthetic
gggcgaggucgugaagc

SEQ ID NO: 6395 - RNA, 17 nt, Artificial Sequence
  Synthetic
caccauaaaguacccag

SEQ ID NO: 6396 - RNA, 17 nt, Artificial Sequence
  Synthetic
uaaaguacccagaggcg

SEQ ID NO: 6397 - RNA, 17 nt, Artificial Sequence
  Synthetic
aaaguacccagaggcgc

SEQ ID NO: 6398 - RNA, 17 nt, Artificial Sequence
  Synthetic
acccagaggcgcgggcc

SEQ ID NO: 6399 - RNA, 17 nt, Artificial Sequence
  Synthetic
gggccugguugccaugc

SEQ ID NO: 6400 - RNA, 17 nt, Artificial Sequence
  Synthetic
ggccugguugccaugca

SEQ ID NO: 6401 - RNA, 17 nt, Artificial Sequence
  Synthetic
cugguugccaugcaggg

SEQ ID NO: 6402 - RNA, 17 nt, Artificial Sequence
  Synthetic
ugguugccaugcagggu

SEQ ID NO: 6403 - RNA, 17 nt, Artificial Sequence
  Synthetic
uugccaugcaggguggg

SEQ ID NO: 6404 - RNA, 17 nt, Artificial Sequence
  Synthetic
ugccaugcaggguggga

SEQ ID NO: 6405 - RNA, 17 nt, Artificial Sequence
  Synthetic
gccaugcagggugggag

SEQ ID NO: 6406 - RNA, 17 nt, Artificial Sequence
  Synthetic
gugggaggggucgucaa

SEQ ID NO: 6407 - RNA, 17 nt, Artificial Sequence
  Synthetic
gucgucaacggcgcccc

SEQ ID NO: 6408 - RNA, 17 nt, Artificial Sequence
  Synthetic
gccgcgcugcgcaccag

SEQ ID NO: 6409 - RNA, 17 nt, Artificial Sequence
  Synthetic
ccgcgcugcgcaccagc

SEQ ID NO: 6410 - RNA, 17 nt, Artificial Sequence
  Synthetic
cgcugcgcaccagcggg

SEQ ID NO: 6411 - RNA, 17 nt, Artificial Sequence
  Synthetic
gcaccagcgggagguua

SEQ ID NO: 6412 - RNA, 17 nt, Artificial Sequence
  Synthetic
uaaggugcucgcgaaug

SEQ ID NO: 6413 - RNA, 17 nt, Artificial Sequence
  Synthetic
gguuuagcucccgcagc

SEQ ID NO: 6414 - RNA, 17 nt, Artificial Sequence
  Synthetic
uuagcucccgcagccgg

SEQ ID NO: 6415 - RNA, 17 nt, Artificial Sequence
  Synthetic
uagcucccgcagccggc

SEQ ID NO: 6416 - RNA, 17 nt, Artificial Sequence
  Synthetic
agccggcgggccucgau

SEQ ID NO: 6417 - RNA, 17 nt, Artificial Sequence
  Synthetic
ccucgauuggcacuccc

SEQ ID NO: 6418 - RNA, 17 nt, Artificial Sequence
  Synthetic
gauuggcacuccccgga

SEQ ID NO: 6419 - RNA, 17 nt, Artificial Sequence
  Synthetic
uccguugacgaacauga

SEQ ID NO: 6420 - RNA, 17 nt, Artificial Sequence
  Synthetic
ccguugacgaacaugaa

SEQ ID NO: 6421 - RNA, 17 nt, Artificial Sequence
  Synthetic
ugacgaacaugaagggc

SEQ ID NO: 6422 - RNA, 17 nt, Artificial Sequence
  Synthetic
acugacgccagcucucc

SEQ ID NO: 6423 - RNA, 17 nt, Artificial Sequence
  Synthetic
ucuccaggucgcaacag

SEQ ID NO: 6424 - RNA, 17 nt, Artificial Sequence
  Synthetic
aacagaggcagucaaac

SEQ ID NO: 6425 - RNA, 17 nt, Artificial Sequence
  Synthetic
gaggcagucaaacaggu

SEQ ID NO: 6426 - RNA, 17 nt, Artificial Sequence
  Synthetic
aggcagucaaacagguc

SEQ ID NO: 6427 - RNA, 17 nt, Artificial Sequence
  Synthetic
gggccgcaucaucugcu

SEQ ID NO: 6428 - RNA, 17 nt, Artificial Sequence
  Synthetic
caucugcucggcguacg

SEQ ID NO: 6429 - RNA, 17 nt, Artificial Sequence
  Synthetic
cggcguacgcggcccau

SEQ ID NO: 6430 - RNA, 17 nt, Artificial Sequence
  Synthetic
cggcccauaggaucucg

SEQ ID NO: 6431 - RNA, 17 nt, Artificial Sequence
  Synthetic
ggcccauaggaucucgc

SEQ ID NO: 6432 - RNA, 17 nt, Artificial Sequence
  Synthetic
aacacgcgccagacgag

SEQ ID NO: 6433 - RNA, 17 nt, Artificial Sequence
  Synthetic
ccagacgagcggucucu

SEQ ID NO: 6434 - RNA, 17 nt, Artificial Sequence
  Synthetic
guaccuguccgcgaucg

SEQ ID NO: 6435 - RNA, 17 nt, Artificial Sequence
  Synthetic
cgcgcagcauuucuccc

SEQ ID NO: 6436 - RNA, 17 nt, Artificial Sequence
  Synthetic
guccgcgcaugugcgcc

SEQ ID NO: 6437 - RNA, 17 nt, Artificial Sequence
  Synthetic
cgcgcaugugcgccugg

SEQ ID NO: 6438 - RNA, 17 nt, Artificial Sequence
  Synthetic
ccuggcggugcagcugc

SEQ ID NO: 6439 - RNA, 17 nt, Artificial Sequence
  Synthetic
gugcagcugccggacgc

SEQ ID NO: 6440 - RNA, 17 nt, Artificial Sequence
  Synthetic
gccggacgcuggcgcgc

SEQ ID NO: 6441 - RNA, 17 nt, Artificial Sequence
  Synthetic
cgcuggcgcgcagguac

SEQ ID NO: 6442 - RNA, 17 nt, Artificial Sequence
  Synthetic
cgcgcagguaccgguac

SEQ ID NO: 6443 - RNA, 17 nt, Artificial Sequence
  Synthetic
gcgcagguaccgguaca

SEQ ID NO: 6444 - RNA, 17 nt, Artificial Sequence
  Synthetic
cagggccgagcagaagu

SEQ ID NO: 6445 - RNA, 17 nt, Artificial Sequence
  Synthetic
gcagaaguuggccaaca

SEQ ID NO: 6446 - RNA, 20 nt, Artificial Sequence
  Synthetic
ucgacgagcuguuugccgac

SEQ ID NO: 6447 - RNA, 20 nt, Artificial Sequence
  Synthetic
agcuguuugccgacaugaac

SEQ ID NO: 6448 - RNA, 20 nt, Artificial Sequence
  Synthetic
gccaccgcccccccgcccgg

SEQ ID NO: 6449 - RNA, 20 nt, Artificial Sequence
  Synthetic
cggcccccccgcuguacgca

SEQ ID NO: 6450 - RNA, 20 nt, Artificial Sequence
  Synthetic
cgcuguacgcaacggggcgc

SEQ ID NO: 6451 - RNA, 20 nt, Artificial Sequence
  Synthetic
uuaaccgucuccucgacgac

SEQ ID NO: 6452 - RNA, 20 nt, Artificial Sequence
  Synthetic
ucgacgacuugggcuuuagc

SEQ ID NO: 6453 - RNA, 20 nt, Artificial Sequence
  Synthetic
cuauguaccaugcucgauac

SEQ ID NO: 6454 - RNA, 20 nt, Artificial Sequence
  Synthetic
uaccaugcucgauaccugga

SEQ ID NO: 6455 - RNA, 20 nt, Artificial Sequence
  Synthetic
ccaugcucgauaccuggaac

SEQ ID NO: 6456 - RNA, 20 nt, Artificial Sequence
  Synthetic
ccgaccaacgccgaccugua

SEQ ID NO: 6457 - RNA, 20 nt, Artificial Sequence
  Synthetic
caacgcugcccagcgaugug

SEQ ID NO: 6458 - RNA, 20 nt, Artificial Sequence
  Synthetic
cugcccagcgauguggugga

SEQ ID NO: 6459 - RNA, 20 nt, Artificial Sequence
  Synthetic
auggggggacgcguacgucc

SEQ ID NO: 6460 - RNA, 20 nt, Artificial Sequence
  Synthetic
uccggccacccgcgacggcc

SEQ ID NO: 6461 - RNA, 20 nt, Artificial Sequence
  Synthetic
cgacggccucgggcucuacu

SEQ ID NO: 6462 - RNA, 20 nt, Artificial Sequence
  Synthetic
gcucucucguuucuuccacg

SEQ ID NO: 6463 - RNA, 20 nt, Artificial Sequence
  Synthetic
cguuucuuccacgccgagcu

SEQ ID NO: 6464 - RNA, 20 nt, Artificial Sequence
  Synthetic
uuccacgccgagcuacgggc

SEQ ID NO: 6465 - RNA, 20 nt, Artificial Sequence
  Synthetic
acgccgagcuacgggcgcgg

SEQ ID NO: 6466 - RNA, 20 nt, Artificial Sequence
  Synthetic
ccgagcuacgggcgcgggag

SEQ ID NO: 6467 - RNA, 17 nt, Artificial Sequence
  Synthetic
acgagcuguuugccgac

SEQ ID NO: 6468 - RNA, 17 nt, Artificial Sequence
  Synthetic
uguuugccgacaugaac

SEQ ID NO: 6469 - RNA, 17 nt, Artificial Sequence
  Synthetic
accgcccccccgcccgg

SEQ ID NO: 6470 - RNA, 17 nt, Artificial Sequence
  Synthetic
cccccccgcuguacgca

SEQ ID NO: 6471 - RNA, 17 nt, Artificial Sequence
  Synthetic
uguacgcaacggggcgc

SEQ ID NO: 6472 - RNA, 17 nt, Artificial Sequence
  Synthetic
accgucuccucgacgac

SEQ ID NO: 6473 - RNA, 17 nt, Artificial Sequence
  Synthetic
acgacuugggcuuuagc

SEQ ID NO: 6474 - RNA, 17 nt, Artificial Sequence
  Synthetic
uguaccaugcucgauac

SEQ ID NO: 6475 - RNA, 17 nt, Artificial Sequence
  Synthetic
caugcucgauaccugga

SEQ ID NO: 6476 - RNA, 17 nt, Artificial Sequence
  Synthetic
ugcucgauaccuggaac

SEQ ID NO: 6477 - RNA, 17 nt, Artificial Sequence
  Synthetic
accaacgccgaccugua

SEQ ID NO: 6478 - RNA, 17 nt, Artificial Sequence
  Synthetic
cgcugcccagcgaugug

SEQ ID NO: 6479 - RNA, 17 nt, Artificial Sequence
  Synthetic
cccagcgauguggugga

SEQ ID NO: 6480 - RNA, 17 nt, Artificial Sequence
  Synthetic
gggggacgcguacgucc

SEQ ID NO: 6481 - RNA, 17 nt, Artificial Sequence
  Synthetic
ggccacccgcgacggcc

SEQ ID NO: 6482 - RNA, 17 nt, Artificial Sequence
  Synthetic
cggccucgggcucuacu

SEQ ID NO: 6483 - RNA, 17 nt, Artificial Sequence
  Synthetic
cucucguuucuuccacg

SEQ ID NO: 6484 - RNA, 17 nt, Artificial Sequence
  Synthetic
uucuuccacgccgagcu

SEQ ID NO: 6485 - RNA, 17 nt, Artificial Sequence
  Synthetic
cacgccgagcuacgggc

SEQ ID NO: 6486 - RNA, 17 nt, Artificial Sequence
  Synthetic
ccgagcuacgggcgcgg

SEQ ID NO: 6487 - RNA, 17 nt, Artificial Sequence
  Synthetic
agcuacgggcgcgggag

SEQ ID NO: 6488 - RNA, 20 nt, Artificial Sequence
  Synthetic
cggcaaacagcucgucgacc

SEQ ID NO: 6489 - RNA, 20 nt, Artificial Sequence
  Synthetic
ggccgggcgggggggcggug

SEQ ID NO: 6490 - RNA, 20 nt, Artificial Sequence
  Synthetic
uuuuugggacccccggccgg

SEQ ID NO: 6491 - RNA, 20 nt, Artificial Sequence
  Synthetic
gguguuuuugggacccccgg

SEQ ID NO: 6492 - RNA, 20 nt, Artificial Sequence
  Synthetic
ggggggccgccgggguguuu

SEQ ID NO: 6493 - RNA, 20 nt, Artificial Sequence
  Synthetic
ugcguacagcgggggggccg

SEQ ID NO: 6494 - RNA, 20 nt, Artificial Sequence
  Synthetic
caggcgccccguugcguaca

SEQ ID NO: 6495 - RNA, 20 nt, Artificial Sequence
  Synthetic
auggguggggagggcaugag

SEQ ID NO: 6496 - RNA, 20 nt, Artificial Sequence
  Synthetic
cgggcauggguggggagggc

SEQ ID NO: 6497 - RNA, 20 nt, Artificial Sequence
  Synthetic
gggggacgggcauggguggg

SEQ ID NO: 6498 - RNA, 20 nt, Artificial Sequence
  Synthetic
ggcgggggggacgggcaugg

SEQ ID NO: 6499 - RNA, 20 nt, Artificial Sequence
  Synthetic
gggcggcgggggggacgggc

SEQ ID NO: 6500 - RNA, 20 nt, Artificial Sequence
  Synthetic
uaaagagggcggcggggggg

SEQ ID NO: 6501 - RNA, 20 nt, Artificial Sequence
  Synthetic
ggagacgguuaaagagggcg

SEQ ID NO: 6502 - RNA, 20 nt, Artificial Sequence
  Synthetic
ucgucgaggagacgguuaaa

SEQ ID NO: 6503 - RNA, 20 nt, Artificial Sequence
  Synthetic
agucgucgaggagacgguua

SEQ ID NO: 6504 - RNA, 20 nt, Artificial Sequence
  Synthetic
gcgcuaaagcccaagucguc

SEQ ID NO: 6505 - RNA, 20 nt, Artificial Sequence
  Synthetic
ccgcgcuaaagcccaagucg

SEQ ID NO: 6506 - RNA, 20 nt, Artificial Sequence
  Synthetic
uaucgagcaugguacauagc

SEQ ID NO: 6507 - RNA, 20 nt, Artificial Sequence
  Synthetic
acagauccucguuccaggua

SEQ ID NO: 6508 - RNA, 20 nt, Artificial Sequence
  Synthetic
gucggcguuggucgguagcg

SEQ ID NO: 6509 - RNA, 20 nt, Artificial Sequence
  Synthetic
acaucgcugggcagcguuga

SEQ ID NO: 6510 - RNA, 20 nt, Artificial Sequence
  Synthetic
ccccccauuccaccacaucg

SEQ ID NO: 6511 - RNA, 20 nt, Artificial Sequence
  Synthetic
gaaugucgauuugggugcgu

SEQ ID NO: 6512 - RNA, 20 nt, Artificial Sequence
  Synthetic
ccgugggcgcgaaugucgau

SEQ ID NO: 6513 - RNA, 20 nt, Artificial Sequence
  Synthetic
aaggccacgucgccgugggc

SEQ ID NO: 6514 - RNA, 20 nt, Artificial Sequence
  Synthetic
guagggaaggccacgucgcc

SEQ ID NO: 6515 - RNA, 20 nt, Artificial Sequence
  Synthetic
gucgcggguggccggaagcg

SEQ ID NO: 6516 - RNA, 20 nt, Artificial Sequence
  Synthetic
cccgaggccgucgcgggugg

SEQ ID NO: 6517 - RNA, 20 nt, Artificial Sequence
  Synthetic
uaguagagcccgaggccguc

SEQ ID NO: 6518 - RNA, 20 nt, Artificial Sequence
  Synthetic
agagcgcuucguaguagagc

SEQ ID NO: 6519 - RNA, 20 nt, Artificial Sequence
  Synthetic
aacgagagagcgcuucguag

SEQ ID NO: 6520 - RNA, 20 nt, Artificial Sequence
  Synthetic
gcucggcguggaagaaacga

SEQ ID NO: 6521 - RNA, 20 nt, Artificial Sequence
  Synthetic
uagcucggcguggaagaaac

SEQ ID NO: 6522 - RNA, 20 nt, Artificial Sequence
  Synthetic
cguagcucggcguggaagaa

SEQ ID NO: 6523 - RNA, 20 nt, Artificial Sequence
  Synthetic
gcgcccguagcucggcgugg

SEQ ID NO: 6524 - RNA, 20 nt, Artificial Sequence
  Synthetic
ucccgcgcccguagcucggc

SEQ ID NO: 6525 - RNA, 17 nt, Artificial Sequence
  Synthetic
caaacagcucgucgacc

SEQ ID NO: 6526 - RNA, 17 nt, Artificial Sequence
  Synthetic
cgggcgggggggcggug

SEQ ID NO: 6527 - RNA, 17 nt, Artificial Sequence
  Synthetic
uugggacccccggccgg

SEQ ID NO: 6528 - RNA, 17 nt, Artificial Sequence
  Synthetic
guuuuugggacccccgg

SEQ ID NO: 6529 - RNA, 17 nt, Artificial Sequence
  Synthetic
gggccgccgggguguuu

SEQ ID NO: 6530 - RNA, 17 nt, Artificial Sequence
  Synthetic
guacagcgggggggccg

SEQ ID NO: 6531 - RNA, 17 nt, Artificial Sequence
  Synthetic
gcgccccguugcguaca

SEQ ID NO: 6532 - RNA, 17 nt, Artificial Sequence
  Synthetic
gguggggagggcaugag

SEQ ID NO: 6533 - RNA, 17 nt, Artificial Sequence
  Synthetic
gcauggguggggagggc

SEQ ID NO: 6534 - RNA, 17 nt, Artificial Sequence
  Synthetic
ggacgggcauggguggg

SEQ ID NO: 6535 - RNA, 17 nt, Artificial Sequence
  Synthetic
gggggggacgggcaugg

SEQ ID NO: 6536 - RNA, 17 nt, Artificial Sequence
  Synthetic
cggcgggggggacgggc

SEQ ID NO: 6537 - RNA, 17 nt, Artificial Sequence
  Synthetic
agagggcggcggggggg

SEQ ID NO: 6538 - RNA, 17 nt, Artificial Sequence
  Synthetic
gacgguuaaagagggcg

SEQ ID NO: 6539 - RNA, 17 nt, Artificial Sequence
  Synthetic
ucgaggagacgguuaaa

SEQ ID NO: 6540 - RNA, 17 nt, Artificial Sequence
  Synthetic
cgucgaggagacgguua

SEQ ID NO: 6541 - RNA, 17 nt, Artificial Sequence
  Synthetic
cuaaagcccaagucguc

SEQ ID NO: 6542 - RNA, 17 nt, Artificial Sequence
  Synthetic
cgcuaaagcccaagucg

SEQ ID NO: 6543 - RNA, 17 nt, Artificial Sequence
  Synthetic
cgagcaugguacauagc

SEQ ID NO: 6544 - RNA, 17 nt, Artificial Sequence
  Synthetic
gauccucguuccaggua

SEQ ID NO: 6545 - RNA, 17 nt, Artificial Sequence
  Synthetic
ggcguuggucgguagcg

SEQ ID NO: 6546 - RNA, 17 nt, Artificial Sequence
  Synthetic
ucgcugggcagcguuga

SEQ ID NO: 6547 - RNA, 17 nt, Artificial Sequence
  Synthetic
cccauuccaccacaucg

SEQ ID NO: 6548 - RNA, 17 nt, Artificial Sequence
  Synthetic
ugucgauuugggugcgu

SEQ ID NO: 6549 - RNA, 17 nt, Artificial Sequence
  Synthetic
ugggcgcgaaugucgau

SEQ ID NO: 6550 - RNA, 17 nt, Artificial Sequence
  Synthetic
gccacgucgccgugggc

SEQ ID NO: 6551 - RNA, 17 nt, Artificial Sequence
  Synthetic
gggaaggccacgucgcc

SEQ ID NO: 6552 - RNA, 17 nt, Artificial Sequence
  Synthetic
gcggguggccggaagcg

SEQ ID NO: 6553 - RNA, 17 nt, Artificial Sequence
  Synthetic
gaggccgucgcgggugg

SEQ ID NO: 6554 - RNA, 17 nt, Artificial Sequence
  Synthetic
uagagcccgaggccguc

SEQ ID NO: 6555 - RNA, 17 nt, Artificial Sequence
  Synthetic
gcgcuucguaguagagc

SEQ ID NO: 6556 - RNA, 17 nt, Artificial Sequence
  Synthetic
gagagagcgcuucguag

SEQ ID NO: 6557 - RNA, 17 nt, Artificial Sequence
  Synthetic
cggcguggaagaaacga

SEQ ID NO: 6558 - RNA, 17 nt, Artificial Sequence
  Synthetic
cucggcguggaagaaac

SEQ ID NO: 6559 - RNA, 17 nt, Artificial Sequence
  Synthetic
agcucggcguggaagaa

SEQ ID NO: 6560 - RNA, 17 nt, Artificial Sequence
  Synthetic
cccguagcucggcgugg

SEQ ID NO: 6561 - RNA, 17 nt, Artificial Sequence
  Synthetic
cgcgcccguagcucggc

SEQ ID NO: 6562 - RNA, 20 nt, Artificial Sequence
  Synthetic
gcaccgccaggcgcacaugc

SEQ ID NO: 6563 - RNA, 20 nt, Artificial Sequence
  Synthetic
ugcgcggacgcgaucgcgac

SEQ ID NO: 6564 - RNA, 20 nt, Artificial Sequence
  Synthetic
cggacgcgaucgcgaccugg

SEQ ID NO: 6565 - RNA, 20 nt, Artificial Sequence
  Synthetic
aaaugcugcgcgccacgauc

SEQ ID NO: 6566 - RNA, 20 nt, Artificial Sequence
  Synthetic
acgaucgcggacagguacua

SEQ ID NO: 6567 - RNA, 20 nt, Artificial Sequence
  Synthetic
gaucgcggacagguacuacc

SEQ ID NO: 6568 - RNA, 20 nt, Artificial Sequence
  Synthetic
uuuguaucuauuuuugaccc

SEQ ID NO: 6569 - RNA, 20 nt, Artificial Sequence
  Synthetic
uuuuugacccgcgagauccu

SEQ ID NO: 6570 - RNA, 20 nt, Artificial Sequence
  Synthetic
gauccuaugggccgcguacg

SEQ ID NO: 6571 - RNA, 20 nt, Artificial Sequence
  Synthetic
uugacugccucuguugcgac

SEQ ID NO: 6572 - RNA, 20 nt, Artificial Sequence
  Synthetic
acugccucuguugcgaccug

SEQ ID NO: 6573 - RNA, 20 nt, Artificial Sequence
  Synthetic
uggagagcuggcgucaguug

SEQ ID NO: 6574 - RNA, 20 nt, Artificial Sequence
  Synthetic
ccagcccuucauguucguca

SEQ ID NO: 6575 - RNA, 20 nt, Artificial Sequence
  Synthetic
gucaacggagcgcucaccgu

SEQ ID NO: 6576 - RNA, 20 nt, Artificial Sequence
  Synthetic
caccguccggggagugccaa

SEQ ID NO: 6577 - RNA, 20 nt, Artificial Sequence
  Synthetic
ccaaucgaggcccgccggcu

SEQ ID NO: 6578 - RNA, 20 nt, Artificial Sequence
  Synthetic
gcgggagcuaaaccacauuc

SEQ ID NO: 6579 - RNA, 20 nt, Artificial Sequence
  Synthetic
cgcuggugcgcagcgcggcu

SEQ ID NO: 6580 - RNA, 20 nt, Artificial Sequence
  Synthetic
uggugcgcagcgcggcuacg

SEQ ID NO: 6581 - RNA, 20 nt, Artificial Sequence
  Synthetic
cagcgcggcuacggaggagc

SEQ ID NO: 6582 - RNA, 20 nt, Artificial Sequence
  Synthetic
uggcaaccaggcccgcgccu

SEQ ID NO: 6583 - RNA, 20 nt, Artificial Sequence
  Synthetic
ggguacuuuaugguguugau

SEQ ID NO: 6584 - RNA, 20 nt, Artificial Sequence
  Synthetic
acuuuaugguguugauucgg

SEQ ID NO: 6585 - RNA, 20 nt, Artificial Sequence
  Synthetic
ugguguugauucgggcgaag

SEQ ID NO: 6586 - RNA, 20 nt, Artificial Sequence
  Synthetic
cagcuucacgaccucgcccu

SEQ ID NO: 6587 - RNA, 20 nt, Artificial Sequence
  Synthetic
ucgcccuccgaggcggucau

SEQ ID NO: 6588 - RNA, 20 nt, Artificial Sequence
  Synthetic
acgcguacagccgcgcgcgu

SEQ ID NO: 6589 - RNA, 20 nt, Artificial Sequence
  Synthetic
cgcgcguacgaaaaacaauu

SEQ ID NO: 6590 - RNA, 20 nt, Artificial Sequence
  Synthetic
aaacaauuacgggucuacca

SEQ ID NO: 6591 - RNA, 20 nt, Artificial Sequence
  Synthetic
acaauuacgggucuaccauc

SEQ ID NO: 6592 - RNA, 20 nt, Artificial Sequence
  Synthetic
ucgagggccugcucgaucuc

SEQ ID NO: 6593 - RNA, 20 nt, Artificial Sequence
  Synthetic
ucucccggacgacgacgccc

SEQ ID NO: 6594 - RNA, 20 nt, Artificial Sequence
  Synthetic
cccggacgacgacgcccccg

SEQ ID NO: 6595 - RNA, 20 nt, Artificial Sequence
  Synthetic
acgacgacgcccccgaagag

SEQ ID NO: 6596 - RNA, 20 nt, Artificial Sequence
  Synthetic
cgcgccuguccuuucucccc

SEQ ID NO: 6597 - RNA, 20 nt, Artificial Sequence
  Synthetic
cccccccgaccgaugucagc

SEQ ID NO: 6598 - RNA, 20 nt, Artificial Sequence
  Synthetic
gaccgaugucagccuggggg

SEQ ID NO: 6599 - RNA, 20 nt, Artificial Sequence
  Synthetic
ggacgagcuccacuuagacg

SEQ ID NO: 6600 - RNA, 20 nt, Artificial Sequence
  Synthetic
acgagcuccacuuagacggc

SEQ ID NO: 6601 - RNA, 20 nt, Artificial Sequence
  Synthetic
acgcgcuagacgauuucgau

SEQ ID NO: 6602 - RNA, 20 nt, Artificial Sequence
  Synthetic
acgauuucgaucuggacaug

SEQ ID NO: 6603 - RNA, 20 nt, Artificial Sequence
  Synthetic
cgaucuggacauguuggggg

SEQ ID NO: 6604 - RNA, 20 nt, Artificial Sequence
  Synthetic
uguugggggacggggauucc

SEQ ID NO: 6605 - RNA, 20 nt, Artificial Sequence
  Synthetic
gggacggggauuccccgggg

SEQ ID NO: 6606 - RNA, 20 nt, Artificial Sequence
  Synthetic
acuccgcccccuacggcgcu

SEQ ID NO: 6607 - RNA, 20 nt, Artificial Sequence
  Synthetic
cgcucuggauauggccgacu

SEQ ID NO: 6608 - RNA, 20 nt, Artificial Sequence
  Synthetic
ggauauggccgacuucgagu

SEQ ID NO: 6609 - RNA, 20 nt, Artificial Sequence
  Synthetic
gcagauguuuaccgaugccc

SEQ ID NO: 6610 - RNA, 20 nt, Artificial Sequence
  Synthetic
uaccgaugcccuuggaauug

SEQ ID NO: 6611 - RNA, 20 nt, Artificial Sequence
  Synthetic
ccuuggaauugacgaguacg

SEQ ID NO: 6612 - RNA, 17 nt, Artificial Sequence
  Synthetic
ccgccaggcgcacaugc

SEQ ID NO: 6613 - RNA, 17 nt, Artificial Sequence
  Synthetic
gcggacgcgaucgcgac

SEQ ID NO: 6614 - RNA, 17 nt, Artificial Sequence
  Synthetic
acgcgaucgcgaccugg

SEQ ID NO: 6615 - RNA, 17 nt, Artificial Sequence
  Synthetic
ugcugcgcgccacgauc

SEQ ID NO: 6616 - RNA, 17 nt, Artificial Sequence
  Synthetic
aucgcggacagguacua

SEQ ID NO: 6617 - RNA, 17 nt, Artificial Sequence
  Synthetic
cgcggacagguacuacc

SEQ ID NO: 6618 - RNA, 17 nt, Artificial Sequence
  Synthetic
guaucuauuuuugaccc

SEQ ID NO: 6619 - RNA, 17 nt, Artificial Sequence
  Synthetic
uugacccgcgagauccu

SEQ ID NO: 6620 - RNA, 17 nt, Artificial Sequence
  Synthetic
ccuaugggccgcguacg

SEQ ID NO: 6621 - RNA, 17 nt, Artificial Sequence
  Synthetic
acugccucuguugcgac

SEQ ID NO: 6622 - RNA, 17 nt, Artificial Sequence
  Synthetic
gccucuguugcgaccug

SEQ ID NO: 6623 - RNA, 17 nt, Artificial Sequence
  Synthetic
agagcuggcgucaguug

SEQ ID NO: 6624 - RNA, 17 nt, Artificial Sequence
  Synthetic
gcccuucauguucguca

SEQ ID NO: 6625 - RNA, 17 nt, Artificial Sequence
  Synthetic
aacggagcgcucaccgu

SEQ ID NO: 6626 - RNA, 17 nt, Artificial Sequence
  Synthetic
cguccggggagugccaa

SEQ ID NO: 6627 - RNA, 17 nt, Artificial Sequence
  Synthetic
aucgaggcccgccggcu

SEQ ID NO: 6628 - RNA, 17 nt, Artificial Sequence
  Synthetic
ggagcuaaaccacauuc

SEQ ID NO: 6629 - RNA, 17 nt, Artificial Sequence
  Synthetic
uggugcgcagcgcggcu

SEQ ID NO: 6630 - RNA, 17 nt, Artificial Sequence
  Synthetic
ugcgcagcgcggcuacg

SEQ ID NO: 6631 - RNA, 17 nt, Artificial Sequence
  Synthetic
cgcggcuacggaggagc

SEQ ID NO: 6632 - RNA, 17 nt, Artificial Sequence
  Synthetic
caaccaggcccgcgccu

SEQ ID NO: 6633 - RNA, 17 nt, Artificial Sequence
  Synthetic
uacuuuaugguguugau

SEQ ID NO: 6634 - RNA, 17 nt, Artificial Sequence
  Synthetic
uuaugguguugauucgg

SEQ ID NO: 6635 - RNA, 17 nt, Artificial Sequence
  Synthetic
uguugauucgggcgaag

SEQ ID NO: 6636 - RNA, 17 nt, Artificial Sequence
  Synthetic
cuucacgaccucgcccu

SEQ ID NO: 6637 - RNA, 17 nt, Artificial Sequence
  Synthetic
cccuccgaggcggucau

SEQ ID NO: 6638 - RNA, 17 nt, Artificial Sequence
  Synthetic
cguacagccgcgcgcgu

SEQ ID NO: 6639 - RNA, 17 nt, Artificial Sequence
  Synthetic
gcguacgaaaaacaauu

SEQ ID NO: 6640 - RNA, 17 nt, Artificial Sequence
  Synthetic
caauuacgggucuacca

SEQ ID NO: 6641 - RNA, 17 nt, Artificial Sequence
  Synthetic
auuacgggucuaccauc

SEQ ID NO: 6642 - RNA, 17 nt, Artificial Sequence
  Synthetic
agggccugcucgaucuc

SEQ ID NO: 6643 - RNA, 17 nt, Artificial Sequence
  Synthetic
cccggacgacgacgccc

SEQ ID NO: 6644 - RNA, 17 nt, Artificial Sequence
  Synthetic
ggacgacgacgcccccg

SEQ ID NO: 6645 - RNA, 17 nt, Artificial Sequence
  Synthetic
acgacgcccccgaagag

SEQ ID NO: 6646 - RNA, 17 nt, Artificial Sequence
  Synthetic
gccuguccuuucucccc

SEQ ID NO: 6647 - RNA, 17 nt, Artificial Sequence
  Synthetic
ccccgaccgaugucagc

SEQ ID NO: 6648 - RNA, 17 nt, Artificial Sequence
  Synthetic
cgaugucagccuggggg

SEQ ID NO: 6649 - RNA, 17 nt, Artificial Sequence
  Synthetic
cgagcuccacuuagacg

SEQ ID NO: 6650 - RNA, 17 nt, Artificial Sequence
  Synthetic
agcuccacuuagacggc

SEQ ID NO: 6651 - RNA, 17 nt, Artificial Sequence
  Synthetic
cgcuagacgauuucgau

SEQ ID NO: 6652 - RNA, 17 nt, Artificial Sequence
  Synthetic
auuucgaucuggacaug

SEQ ID NO: 6653 - RNA, 17 nt, Artificial Sequence
  Synthetic
ucuggacauguuggggg

SEQ ID NO: 6654 - RNA, 17 nt, Artificial Sequence
  Synthetic
ugggggacggggauucc

SEQ ID NO: 6655 - RNA, 17 nt, Artificial Sequence
  Synthetic
acggggauuccccgggg

SEQ ID NO: 6656 - RNA, 17 nt, Artificial Sequence
  Synthetic
ccgcccccuacggcgcu

SEQ ID NO: 6657 - RNA, 17 nt, Artificial Sequence
  Synthetic
ucuggauauggccgacu

SEQ ID NO: 6658 - RNA, 17 nt, Artificial Sequence
  Synthetic
uauggccgacuucgagu

SEQ ID NO: 6659 - RNA, 17 nt, Artificial Sequence
  Synthetic
gauguuuaccgaugccc

SEQ ID NO: 6660 - RNA, 17 nt, Artificial Sequence
  Synthetic
cgaugcccuuggaauug

SEQ ID NO: 6661 - RNA, 17 nt, Artificial Sequence
  Synthetic
uggaauugacgaguacg

SEQ ID NO: 6662 - RNA, 20 nt, Artificial Sequence
  Synthetic
gguaccgguacagggccgag

SEQ ID NO: 6663 - RNA, 20 nt, Artificial Sequence
  Synthetic
gcgcagguaccgguacaggg

SEQ ID NO: 6664 - RNA, 20 nt, Artificial Sequence
  Synthetic
cuggcgcgcagguaccggua

SEQ ID NO: 6665 - RNA, 20 nt, Artificial Sequence
  Synthetic
ugcgccuggcggugcagcug

SEQ ID NO: 6666 - RNA, 20 nt, Artificial Sequence
  Synthetic
aaaaacaaaacacgcgccag

SEQ ID NO: 6667 - RNA, 20 nt, Artificial Sequence
  Synthetic
uacgcggcccauaggaucuc

SEQ ID NO: 6668 - RNA, 20 nt, Artificial Sequence
  Synthetic
ugcucggcguacgcggccca

SEQ ID NO: 6669 - RNA, 20 nt, Artificial Sequence
  Synthetic
aacagaggcagucaaacagg

SEQ ID NO: 6670 - RNA, 20 nt, Artificial Sequence
  Synthetic
gccagcucuccaggucgcaa

SEQ ID NO: 6671 - RNA, 20 nt, Artificial Sequence
  Synthetic
ccguugacgaacaugaaggg

SEQ ID NO: 6672 - RNA, 20 nt, Artificial Sequence
  Synthetic
gcgcuccguugacgaacaug

SEQ ID NO: 6673 - RNA, 20 nt, Artificial Sequence
  Synthetic
ugagcgcuccguugacgaac

SEQ ID NO: 6674 - RNA, 20 nt, Artificial Sequence
  Synthetic
ggacggugagcgcuccguug

SEQ ID NO: 6675 - RNA, 20 nt, Artificial Sequence
  Synthetic
cgauuggcacuccccggacg

SEQ ID NO: 6676 - RNA, 20 nt, Artificial Sequence
  Synthetic
cgggccucgauuggcacucc

SEQ ID NO: 6677 - RNA, 20 nt, Artificial Sequence
  Synthetic
ugguuuagcucccgcagccg

SEQ ID NO: 6678 - RNA, 20 nt, Artificial Sequence
  Synthetic
agcgggagguuaaggugcuc

SEQ ID NO: 6679 - RNA, 20 nt, Artificial Sequence
  Synthetic
cguagccgcgcugcgcacca

SEQ ID NO: 6680 - RNA, 20 nt, Artificial Sequence
  Synthetic
cugguugccaugcagggugg

SEQ ID NO: 6681 - RNA, 20 nt, Artificial Sequence
  Synthetic
gggccugguugccaugcagg

SEQ ID NO: 6682 - RNA, 20 nt, Artificial Sequence
  Synthetic
gcgcgggccugguugccaug

SEQ ID NO: 6683 - RNA, 20 nt, Artificial Sequence
  Synthetic
accauaaaguacccagaggc

SEQ ID NO: 6684 - RNA, 20 nt, Artificial Sequence
  Synthetic
aaucaacaccauaaaguacc

SEQ ID NO: 6685 - RNA, 20 nt, Artificial Sequence
  Synthetic
gaauacgaguccaacuucgc

SEQ ID NO: 6686 - RNA, 20 nt, Artificial Sequence
  Synthetic
cgaggucgugaagcuggaau

SEQ ID NO: 6687 - RNA, 20 nt, Artificial Sequence
  Synthetic
cggagggcgaggucgugaag

SEQ ID NO: 6688 - RNA, 20 nt, Artificial Sequence
  Synthetic
ccgccucggagggcgagguc

SEQ ID NO: 6689 - RNA, 20 nt, Artificial Sequence
  Synthetic
ccgcaugaccgccucggagg

SEQ ID NO: 6690 - RNA, 20 nt, Artificial Sequence
  Synthetic
guucccgcaugaccgccucg

SEQ ID NO: 6691 - RNA, 20 nt, Artificial Sequence
  Synthetic
cguguucccgcaugaccgcc

SEQ ID NO: 6692 - RNA, 20 nt, Artificial Sequence
  Synthetic
gggcgucgucguccgggaga

SEQ ID NO: 6693 - RNA, 20 nt, Artificial Sequence
  Synthetic
cucuucgggggcgucgucgu

SEQ ID NO: 6694 - RNA, 20 nt, Artificial Sequence
  Synthetic
gagccgccagccccgccucu

SEQ ID NO: 6695 - RNA, 20 nt, Artificial Sequence
  Synthetic
cgcggggagaaaggacaggc

SEQ ID NO: 6696 - RNA, 20 nt, Artificial Sequence
  Synthetic
gcgugugucccgcggggaga

SEQ ID NO: 6697 - RNA, 20 nt, Artificial Sequence
  Synthetic
cugcgcgugugucccgcggg

SEQ ID NO: 6698 - RNA, 20 nt, Artificial Sequence
  Synthetic
acagucugcgcguguguccc

SEQ ID NO: 6699 - RNA, 20 nt, Artificial Sequence
  Synthetic
gucccccaggcugacaucgg

SEQ ID NO: 6700 - RNA, 20 nt, Artificial Sequence
  Synthetic
gccacguccucgccgucuaa

SEQ ID NO: 6701 - RNA, 20 nt, Artificial Sequence
  Synthetic
cgucccccaacauguccaga

SEQ ID NO: 6702 - RNA, 20 nt, Artificial Sequence
  Synthetic
gugggggguaaaucccggcc

SEQ ID NO: 6703 - RNA, 20 nt, Artificial Sequence
  Synthetic
gcgccguagggggcggaguc

SEQ ID NO: 6704 - RNA, 20 nt, Artificial Sequence
  Synthetic
uauccagagcgccguagggg

SEQ ID NO: 6705 - RNA, 20 nt, Artificial Sequence
  Synthetic
cggccauauccagagcgccg

SEQ ID NO: 6706 - RNA, 20 nt, Artificial Sequence
  Synthetic
aacucgaagucggccauauc

SEQ ID NO: 6707 - RNA, 20 nt, Artificial Sequence
  Synthetic
cgguaaacaucugcucaaac

SEQ ID NO: 6708 - RNA, 20 nt, Artificial Sequence
  Synthetic
ccaccguacucgucaauucc

SEQ ID NO: 6709 - RNA, 17 nt, Artificial Sequence
  Synthetic
accgguacagggccgag

SEQ ID NO: 6710 - RNA, 17 nt, Artificial Sequence
  Synthetic
cagguaccgguacaggg

SEQ ID NO: 6711 - RNA, 17 nt, Artificial Sequence
  Synthetic
gcgcgcagguaccggua

SEQ ID NO: 6712 - RNA, 17 nt, Artificial Sequence
  Synthetic
gccuggcggugcagcug

SEQ ID NO: 6713 - RNA, 17 nt, Artificial Sequence
  Synthetic
aacaaaacacgcgccag

SEQ ID NO: 6714 - RNA, 17 nt, Artificial Sequence
  Synthetic
gcggcccauaggaucuc

SEQ ID NO: 6715 - RNA, 17 nt, Artificial Sequence
  Synthetic
ucggcguacgcggccca

SEQ ID NO: 6716 - RNA, 17 nt, Artificial Sequence
  Synthetic
agaggcagucaaacagg

SEQ ID NO: 6717 - RNA, 17 nt, Artificial Sequence
  Synthetic
agcucuccaggucgcaa

SEQ ID NO: 6718 - RNA, 17 nt, Artificial Sequence
  Synthetic
uugacgaacaugaaggg

SEQ ID NO: 6719 - RNA, 17 nt, Artificial Sequence
  Synthetic
cuccguugacgaacaug

SEQ ID NO: 6720 - RNA, 17 nt, Artificial Sequence
  Synthetic
gcgcuccguugacgaac

SEQ ID NO: 6721 - RNA, 17 nt, Artificial Sequence
  Synthetic
cggugagcgcuccguug

SEQ ID NO: 6722 - RNA, 17 nt, Artificial Sequence
  Synthetic
uuggcacuccccggacg

SEQ ID NO: 6723 - RNA, 17 nt, Artificial Sequence
  Synthetic
gccucgauuggcacucc

SEQ ID NO: 6724 - RNA, 17 nt, Artificial Sequence
  Synthetic
uuuagcucccgcagccg

SEQ ID NO: 6725 - RNA, 17 nt, Artificial Sequence
  Synthetic
gggagguuaaggugcuc

SEQ ID NO: 6726 - RNA, 17 nt, Artificial Sequence
  Synthetic
agccgcgcugcgcacca

SEQ ID NO: 6727 - RNA, 17 nt, Artificial Sequence
  Synthetic
guugccaugcagggugg

SEQ ID NO: 6728 - RNA, 17 nt, Artificial Sequence
  Synthetic
ccugguugccaugcagg

SEQ ID NO: 6729 - RNA, 17 nt, Artificial Sequence
  Synthetic
cgggccugguugccaug

SEQ ID NO: 6730 - RNA, 17 nt, Artificial Sequence
  Synthetic
auaaaguacccagaggc

SEQ ID NO: 6731 - RNA, 17 nt, Artificial Sequence
  Synthetic
caacaccauaaaguacc

SEQ ID NO: 6732 - RNA, 17 nt, Artificial Sequence
  Synthetic
uacgaguccaacuucgc

SEQ ID NO: 6733 - RNA, 17 nt, Artificial Sequence
  Synthetic
ggucgugaagcuggaau

SEQ ID NO: 6734 - RNA, 17 nt, Artificial Sequence
  Synthetic
agggcgaggucgugaag

SEQ ID NO: 6735 - RNA, 17 nt, Artificial Sequence
  Synthetic
ccucggagggcgagguc

SEQ ID NO: 6736 - RNA, 17 nt, Artificial Sequence
  Synthetic
caugaccgccucggagg

SEQ ID NO: 6737 - RNA, 17 nt, Artificial Sequence
  Synthetic
cccgcaugaccgccucg

SEQ ID NO: 6738 - RNA, 17 nt, Artificial Sequence
  Synthetic
guucccgcaugaccgcc

SEQ ID NO: 6739 - RNA, 17 nt, Artificial Sequence
  Synthetic
cgucgucguccgggaga

SEQ ID NO: 6740 - RNA, 17 nt, Artificial Sequence
  Synthetic
uucgggggcgucgucgu

SEQ ID NO: 6741 - RNA, 17 nt, Artificial Sequence
  Synthetic
ccgccagccccgccucu

SEQ ID NO: 6742 - RNA, 17 nt, Artificial Sequence
  Synthetic
ggggagaaaggacaggc

SEQ ID NO: 6743 - RNA, 17 nt, Artificial Sequence
  Synthetic
ugugucccgcggggaga

SEQ ID NO: 6744 - RNA, 17 nt, Artificial Sequence
  Synthetic
cgcgugugucccgcggg

SEQ ID NO: 6745 - RNA, 17 nt, Artificial Sequence
  Synthetic
gucugcgcguguguccc

SEQ ID NO: 6746 - RNA, 17 nt, Artificial Sequence
  Synthetic
ccccaggcugacaucgg

SEQ ID NO: 6747 - RNA, 17 nt, Artificial Sequence
  Synthetic
acguccucgccgucuaa

SEQ ID NO: 6748 - RNA, 17 nt, Artificial Sequence
  Synthetic
cccccaacauguccaga

SEQ ID NO: 6749 - RNA, 17 nt, Artificial Sequence
  Synthetic
ggggguaaaucccggcc

SEQ ID NO: 6750 - RNA, 17 nt, Artificial Sequence
  Synthetic
ccguagggggcggaguc

SEQ ID NO: 6751 - RNA, 17 nt, Artificial Sequence
  Synthetic
ccagagcgccguagggg

SEQ ID NO: 6752 - RNA, 17 nt, Artificial Sequence
  Synthetic
ccauauccagagcgccg

SEQ ID NO: 6753 - RNA, 17 nt, Artificial Sequence
  Synthetic
ucgaagucggccauauc

SEQ ID NO: 6754 - RNA, 17 nt, Artificial Sequence
  Synthetic
uaaacaucugcucaaac

SEQ ID NO: 6755 - RNA, 17 nt, Artificial Sequence
  Synthetic
ccguacucgucaauucc

SEQ ID NO: 6756 - RNA, 20 nt, Artificial Sequence
  Synthetic
cacgucgccgugggcgcgaa

SEQ ID NO: 6757 - RNA, 17 nt, Artificial Sequence
  Synthetic
gucgccgugggcgcgaa

SEQ ID NO: 6758 - RNA, 20 nt, Artificial Sequence
  Synthetic
cgccucuggguacuuuaugg

SEQ ID NO: 6759 - RNA, 20 nt, Artificial Sequence
  Synthetic
auggcgcaugccgacgcgcu

SEQ ID NO: 6760 - RNA, 17 nt, Artificial Sequence
  Synthetic
cucuggguacuuuaugg

SEQ ID NO: 6761 - RNA, 17 nt, Artificial Sequence
  Synthetic
gcgcaugccgacgcgcu

SEQ ID NO: 6762 - RNA, 20 nt, Artificial Sequence
  Synthetic
uagcucccgcagccggcggg

SEQ ID NO: 6763 - RNA, 17 nt, Artificial Sequence
  Synthetic
cucccgcagccggcggg

SEQ ID NO: 6764 - RNA, 20 nt, Artificial Sequence
  Synthetic
ggaccucuccgacagcgauc

SEQ ID NO: 6765 - RNA, 20 nt, Artificial Sequence
  Synthetic
cuccgacagcgaucuggacg

SEQ ID NO: 6766 - RNA, 20 nt, Artificial Sequence
  Synthetic
ccgccgcgacgaccuggaau

SEQ ID NO: 6767 - RNA, 20 nt, Artificial Sequence
  Synthetic
cagcggggaguguuccucgu

SEQ ID NO: 6768 - RNA, 20 nt, Artificial Sequence
  Synthetic
uuccucgucggacgaggaca

SEQ ID NO: 6769 - RNA, 20 nt, Artificial Sequence
  Synthetic
gauacucgacgccgcucgcc

SEQ ID NO: 6770 - RNA, 20 nt, Artificial Sequence
  Synthetic
acucgacgccgcucgcccgg

SEQ ID NO: 6771 - RNA, 20 nt, Artificial Sequence
  Synthetic
cacccagacgccucguccga

SEQ ID NO: 6772 - RNA, 20 nt, Artificial Sequence
  Synthetic
gccucguccgacggagcggc

SEQ ID NO: 6773 - RNA, 20 nt, Artificial Sequence
  Synthetic
acaguguguggucgcgccuc

SEQ ID NO: 6774 - RNA, 20 nt, Artificial Sequence
  Synthetic
caguguguggucgcgccucg

SEQ ID NO: 6775 - RNA, 20 nt, Artificial Sequence
  Synthetic
uguggucgcgccucggggcc

SEQ ID NO: 6776 - RNA, 20 nt, Artificial Sequence
  Synthetic
uugcucccccgagcagcacg

SEQ ID NO: 6777 - RNA, 20 nt, Artificial Sequence
  Synthetic
ucggggucgcgguggucccg

SEQ ID NO: 6778 - RNA, 20 nt, Artificial Sequence
  Synthetic
cggggcugccgaugguuugu

SEQ ID NO: 6779 - RNA, 20 nt, Artificial Sequence
  Synthetic
augguuugucggacccccgc

SEQ ID NO: 6780 - RNA, 20 nt, Artificial Sequence
  Synthetic
gcggggguccgacaaaccau

SEQ ID NO: 6781 - RNA, 20 nt, Artificial Sequence
  Synthetic
cgacaaaccaucggcagccc

SEQ ID NO: 6782 - RNA, 20 nt, Artificial Sequence
  Synthetic
gacgcccacggcguccgccg

SEQ ID NO: 6783 - RNA, 20 nt, Artificial Sequence
  Synthetic
ccuugcccccgugcugcucg

SEQ ID NO: 6784 - RNA, 20 nt, Artificial Sequence
  Synthetic
cuugcccccgugcugcucgg

SEQ ID NO: 6785 - RNA, 20 nt, Artificial Sequence
  Synthetic
cgggggagcaagacggucgc

SEQ ID NO: 6786 - RNA, 20 nt, Artificial Sequence
  Synthetic
gggggagcaagacggucgcc

SEQ ID NO: 6787 - RNA, 20 nt, Artificial Sequence
  Synthetic
cgaggcgcgaccacacacug

SEQ ID NO: 6788 - RNA, 20 nt, Artificial Sequence
  Synthetic
gaggcgcgaccacacacugu

SEQ ID NO: 6789 - RNA, 20 nt, Artificial Sequence
  Synthetic
uuggggcccugccgcuccgu

SEQ ID NO: 6790 - RNA, 20 nt, Artificial Sequence
  Synthetic
cccugccgcuccgucggacg

SEQ ID NO: 6791 - RNA, 20 nt, Artificial Sequence
  Synthetic
gcuccgucggacgaggcguc

SEQ ID NO: 6792 - RNA, 20 nt, Artificial Sequence
  Synthetic
cuccgucggacgaggcgucu

SEQ ID NO: 6793 - RNA, 20 nt, Artificial Sequence
  Synthetic
ggucuucuggacgagacggg

SEQ ID NO: 6794 - RNA, 20 nt, Artificial Sequence
  Synthetic
gggcgagcggcgucgaguau

SEQ ID NO: 6795 - RNA, 20 nt, Artificial Sequence
  Synthetic
uccgguccguccucuccgug

SEQ ID NO: 6796 - RNA, 20 nt, Artificial Sequence
  Synthetic
uuccauguccucguccgacg

SEQ ID NO: 6797 - RNA, 20 nt, Artificial Sequence
  Synthetic
uguccgauuccaggucgucg

SEQ ID NO: 6798 - RNA, 20 nt, Artificial Sequence
  Synthetic
ccgauuccaggucgucgcgg

SEQ ID NO: 6799 - RNA, 20 nt, Artificial Sequence
  Synthetic
cggcucuccgccggcucggg

SEQ ID NO: 6800 - RNA, 20 nt, Artificial Sequence
  Synthetic
guccucguccagaucgcugu

SEQ ID NO: 6801 - RNA, 20 nt, Artificial Sequence
  Synthetic
cguccagaucgcugucggag

SEQ ID NO: 6802 - RNA, 20 nt, Artificial Sequence
  Synthetic
gaucgcugucggagaggucc

SEQ ID NO: 6803 - RNA, 20 nt, Artificial Sequence
  Synthetic
ugucggagagguccaggccg

SEQ ID NO: 6804 - RNA, 17 nt, Artificial Sequence
  Synthetic
ccucuccgacagcgauc

SEQ ID NO: 6805 - RNA, 17 nt, Artificial Sequence
  Synthetic
cgacagcgaucuggacg

SEQ ID NO: 6806 - RNA, 17 nt, Artificial Sequence
  Synthetic
ccgcgacgaccuggaau

SEQ ID NO: 6807 - RNA, 17 nt, Artificial Sequence
  Synthetic
cggggaguguuccucgu

SEQ ID NO: 6808 - RNA, 17 nt, Artificial Sequence
  Synthetic
cucgucggacgaggaca

SEQ ID NO: 6809 - RNA, 17 nt, Artificial Sequence
  Synthetic
acucgacgccgcucgcc

SEQ ID NO: 6810 - RNA, 17 nt, Artificial Sequence
  Synthetic
cgacgccgcucgcccgg

SEQ ID NO: 6811 - RNA, 17 nt, Artificial Sequence
  Synthetic
ccagacgccucguccga

SEQ ID NO: 6812 - RNA, 17 nt, Artificial Sequence
  Synthetic
ucguccgacggagcggc

SEQ ID NO: 6813 - RNA, 17 nt, Artificial Sequence
  Synthetic
guguguggucgcgccuc

SEQ ID NO: 6814 - RNA, 17 nt, Artificial Sequence
  Synthetic
uguguggucgcgccucg

SEQ ID NO: 6815 - RNA, 17 nt, Artificial Sequence
  Synthetic
ggucgcgccucggggcc

SEQ ID NO: 6816 - RNA, 17 nt, Artificial Sequence
  Synthetic
cucccccgagcagcacg

SEQ ID NO: 6817 - RNA, 17 nt, Artificial Sequence
  Synthetic
gggucgcgguggucccg

SEQ ID NO: 6818 - RNA, 17 nt, Artificial Sequence
  Synthetic
ggcugccgaugguuugu

SEQ ID NO: 6819 - RNA, 17 nt, Artificial Sequence
  Synthetic
guuugucggacccccgc

SEQ ID NO: 6820 - RNA, 17 nt, Artificial Sequence
  Synthetic
gggguccgacaaaccau

SEQ ID NO: 6821 - RNA, 17 nt, Artificial Sequence
  Synthetic
caaaccaucggcagccc

SEQ ID NO: 6822 - RNA, 17 nt, Artificial Sequence
  Synthetic
gcccacggcguccgccg

SEQ ID NO: 6823 - RNA, 17 nt, Artificial Sequence
  Synthetic
ugcccccgugcugcucg

SEQ ID NO: 6824 - RNA, 17 nt, Artificial Sequence
  Synthetic
gcccccgugcugcucgg

SEQ ID NO: 6825 - RNA, 17 nt, Artificial Sequence
  Synthetic
gggagcaagacggucgc

SEQ ID NO: 6826 - RNA, 17 nt, Artificial Sequence
  Synthetic
ggagcaagacggucgcc

SEQ ID NO: 6827 - RNA, 17 nt, Artificial Sequence
  Synthetic
ggcgcgaccacacacug

SEQ ID NO: 6828 - RNA, 17 nt, Artificial Sequence
  Synthetic
gcgcgaccacacacugu

SEQ ID NO: 6829 - RNA, 17 nt, Artificial Sequence
  Synthetic
gggcccugccgcuccgu

SEQ ID NO: 6830 - RNA, 17 nt, Artificial Sequence
  Synthetic
ugccgcuccgucggacg

SEQ ID NO: 6831 - RNA, 17 nt, Artificial Sequence
  Synthetic
ccgucggacgaggcguc

SEQ ID NO: 6832 - RNA, 17 nt, Artificial Sequence
  Synthetic
cgucggacgaggcgucu

SEQ ID NO: 6833 - RNA, 17 nt, Artificial Sequence
  Synthetic
cuucuggacgagacggg

SEQ ID NO: 6834 - RNA, 17 nt, Artificial Sequence
  Synthetic
cgagcggcgucgaguau

SEQ ID NO: 6835 - RNA, 17 nt, Artificial Sequence
  Synthetic
gguccguccucuccgug

SEQ ID NO: 6836 - RNA, 17 nt, Artificial Sequence
  Synthetic
cauguccucguccgacg

SEQ ID NO: 6837 - RNA, 17 nt, Artificial Sequence
  Synthetic
ccgauuccaggucgucg

SEQ ID NO: 6838 - RNA, 17 nt, Artificial Sequence
  Synthetic
auuccaggucgucgcgg

SEQ ID NO: 6839 - RNA, 17 nt, Artificial Sequence
  Synthetic
cucuccgccggcucggg

SEQ ID NO: 6840 - RNA, 17 nt, Artificial Sequence
  Synthetic
cucguccagaucgcugu

SEQ ID NO: 6841 - RNA, 17 nt, Artificial Sequence
  Synthetic
ccagaucgcugucggag

SEQ ID NO: 6842 - RNA, 17 nt, Artificial Sequence
  Synthetic
cgcugucggagaggucc

SEQ ID NO: 6843 - RNA, 17 nt, Artificial Sequence
  Synthetic
cggagagguccaggccg

SEQ ID NO: 6844 - RNA, 20 nt, Artificial Sequence
  Synthetic
auugauaugcuaauugaccu

SEQ ID NO: 6845 - RNA, 20 nt, Artificial Sequence
  Synthetic
uaugcuaauugaccucggcc

SEQ ID NO: 6846 - RNA, 20 nt, Artificial Sequence
  Synthetic
ggacgaggacccccccgagc

SEQ ID NO: 6847 - RNA, 20 nt, Artificial Sequence
  Synthetic
cgaggacccccccgagccgg

SEQ ID NO: 6848 - RNA, 20 nt, Artificial Sequence
  Synthetic
ggagagccgccgcgacgacc

SEQ ID NO: 6849 - RNA, 20 nt, Artificial Sequence
  Synthetic
gaccuggaaucggacagcag

SEQ ID NO: 6850 - RNA, 20 nt, Artificial Sequence
  Synthetic
accuggaaucggacagcagc

SEQ ID NO: 6851 - RNA, 20 nt, Artificial Sequence
  Synthetic
ccuggaaucggacagcagcg

SEQ ID NO: 6852 - RNA, 20 nt, Artificial Sequence
  Synthetic
ggaguguuccucgucggacg

SEQ ID NO: 6853 - RNA, 20 nt, Artificial Sequence
  Synthetic
gaggacauggaagaccccca

SEQ ID NO: 6854 - RNA, 20 nt, Artificial Sequence
  Synthetic
cauggaagacccccacggag

SEQ ID NO: 6855 - RNA, 20 nt, Artificial Sequence
  Synthetic
gaagacccccacggagagga

SEQ ID NO: 6856 - RNA, 20 nt, Artificial Sequence
  Synthetic
cccccacggagaggacggac

SEQ ID NO: 6857 - RNA, 20 nt, Artificial Sequence
  Synthetic
ccgucucguccagaagaccc

SEQ ID NO: 6858 - RNA, 20 nt, Artificial Sequence
  Synthetic
agacgccucguccgacggag

SEQ ID NO: 6859 - RNA, 20 nt, Artificial Sequence
  Synthetic
ccucguccgacggagcggca

SEQ ID NO: 6860 - RNA, 20 nt, Artificial Sequence
  Synthetic
aaccagcgccccacagugug

SEQ ID NO: 6861 - RNA, 20 nt, Artificial Sequence
  Synthetic
cacaguguguggucgcgccu

SEQ ID NO: 6862 - RNA, 20 nt, Artificial Sequence
  Synthetic
ucuugcucccccgagcagca

SEQ ID NO: 6863 - RNA, 20 nt, Artificial Sequence
  Synthetic
cuugcucccccgagcagcac

SEQ ID NO: 6864 - RNA, 20 nt, Artificial Sequence
  Synthetic
ugcucccccgagcagcacgg

SEQ ID NO: 6865 - RNA, 20 nt, Artificial Sequence
  Synthetic
ccccgagcagcacgggggca

SEQ ID NO: 6866 - RNA, 20 nt, Artificial Sequence
  Synthetic
cgagcagcacgggggcaagg

SEQ ID NO: 6867 - RNA, 20 nt, Artificial Sequence
  Synthetic
accaaagcccagccugcccg

SEQ ID NO: 6868 - RNA, 20 nt, Artificial Sequence
  Synthetic
aaagcccagccugcccgcgg

SEQ ID NO: 6869 - RNA, 20 nt, Artificial Sequence
  Synthetic
ccugcccgcggcggacgccg

SEQ ID NO: 6870 - RNA, 20 nt, Artificial Sequence
  Synthetic
cugcccgcggcggacgccgu

SEQ ID NO: 6871 - RNA, 20 nt, Artificial Sequence
  Synthetic
gcggacgccgugggcgucgc

SEQ ID NO: 6872 - RNA, 20 nt, Artificial Sequence
  Synthetic
cggacgccgugggcgucgca

SEQ ID NO: 6873 - RNA, 20 nt, Artificial Sequence
  Synthetic
ggacgccgugggcgucgcag

SEQ ID NO: 6874 - RNA, 20 nt, Artificial Sequence
  Synthetic
gccgugggcgucgcaggggu

SEQ ID NO: 6875 - RNA, 20 nt, Artificial Sequence
  Synthetic
ccgugggcgucgcagggguc

SEQ ID NO: 6876 - RNA, 20 nt, Artificial Sequence
  Synthetic
cgugggcgucgcaggggucg

SEQ ID NO: 6877 - RNA, 20 nt, Artificial Sequence
  Synthetic
cgucgcaggggucggggucg

SEQ ID NO: 6878 - RNA, 20 nt, Artificial Sequence
  Synthetic
cgcaggggucggggucgcgg

SEQ ID NO: 6879 - RNA, 20 nt, Artificial Sequence
  Synthetic
ggucggggucgcgguggucc

SEQ ID NO: 6880 - RNA, 20 nt, Artificial Sequence
  Synthetic
gucggggucgcggugguccc

SEQ ID NO: 6881 - RNA, 20 nt, Artificial Sequence
  Synthetic
gguggucccggggcugccga

SEQ ID NO: 6882 - RNA, 20 nt, Artificial Sequence
  Synthetic
gacaaaccaucggcagcccc

SEQ ID NO: 6883 - RNA, 20 nt, Artificial Sequence
  Synthetic
cccgaccccugcgacgccca

SEQ ID NO: 6884 - RNA, 20 nt, Artificial Sequence
  Synthetic
acgcccacggcguccgccgc

SEQ ID NO: 6885 - RNA, 20 nt, Artificial Sequence
  Synthetic
ccacggcguccgccgcgggc

SEQ ID NO: 6886 - RNA, 20 nt, Artificial Sequence
  Synthetic
ggcguccgccgcgggcaggc

SEQ ID NO: 6887 - RNA, 20 nt, Artificial Sequence
  Synthetic
gcguccgccgcgggcaggcu

SEQ ID NO: 6888 - RNA, 20 nt, Artificial Sequence
  Synthetic
gccgcgggcaggcugggcuu

SEQ ID NO: 6889 - RNA, 20 nt, Artificial Sequence
  Synthetic
cgggcaggcugggcuuuggu

SEQ ID NO: 6890 - RNA, 20 nt, Artificial Sequence
  Synthetic
gcaggcugggcuuuggucgg

SEQ ID NO: 6891 - RNA, 20 nt, Artificial Sequence
  Synthetic
caggcugggcuuuggucggu

SEQ ID NO: 6892 - RNA, 20 nt, Artificial Sequence
  Synthetic
aggcugggcuuuggucggug

SEQ ID NO: 6893 - RNA, 20 nt, Artificial Sequence
  Synthetic
ggcugggcuuuggucggugg

SEQ ID NO: 6894 - RNA, 20 nt, Artificial Sequence
  Synthetic
gggcuuuggucggugggggu

SEQ ID NO: 6895 - RNA, 20 nt, Artificial Sequence
  Synthetic
cuuuggucgguggggguugg

SEQ ID NO: 6896 - RNA, 20 nt, Artificial Sequence
  Synthetic
uggucgguggggguuggagg

SEQ ID NO: 6897 - RNA, 20 nt, Artificial Sequence
  Synthetic
ggucgguggggguuggaggc

SEQ ID NO: 6898 - RNA, 20 nt, Artificial Sequence
  Synthetic
caccuugcccccgugcugcu

SEQ ID NO: 6899 - RNA, 20 nt, Artificial Sequence
  Synthetic
accuugcccccgugcugcuc

SEQ ID NO: 6900 - RNA, 20 nt, Artificial Sequence
  Synthetic
ugcugcucgggggagcaaga

SEQ ID NO: 6901 - RNA, 20 nt, Artificial Sequence
  Synthetic
aagacggucgccgggccccg

SEQ ID NO: 6902 - RNA, 20 nt, Artificial Sequence
  Synthetic
aggcgcgaccacacacugug

SEQ ID NO: 6903 - RNA, 20 nt, Artificial Sequence
  Synthetic
gaccacacacuguggggcgc

SEQ ID NO: 6904 - RNA, 20 nt, Artificial Sequence
  Synthetic
acacuguggggcgcugguug

SEQ ID NO: 6905 - RNA, 20 nt, Artificial Sequence
  Synthetic
gggcgcugguugaggaucgu

SEQ ID NO: 6906 - RNA, 20 nt, Artificial Sequence
  Synthetic
ggcgcugguugaggaucguu

SEQ ID NO: 6907 - RNA, 20 nt, Artificial Sequence
  Synthetic
gcgcugguugaggaucguug

SEQ ID NO: 6908 - RNA, 20 nt, Artificial Sequence
  Synthetic
cggacgaggcgucugggugc

SEQ ID NO: 6909 - RNA, 20 nt, Artificial Sequence
  Synthetic
ggacgaggcgucugggugcu

SEQ ID NO: 6910 - RNA, 20 nt, Artificial Sequence
  Synthetic
cgucugggugcuggguacgc

SEQ ID NO: 6911 - RNA, 20 nt, Artificial Sequence
  Synthetic
gucugggugcuggguacgcc

SEQ ID NO: 6912 - RNA, 20 nt, Artificial Sequence
  Synthetic
ucugggugcuggguacgccg

SEQ ID NO: 6913 - RNA, 20 nt, Artificial Sequence
  Synthetic
cuggguacgccggggucuuc

SEQ ID NO: 6914 - RNA, 20 nt, Artificial Sequence
  Synthetic
ccggggucuucuggacgaga

SEQ ID NO: 6915 - RNA, 20 nt, Artificial Sequence
  Synthetic
cggggucuucuggacgagac

SEQ ID NO: 6916 - RNA, 20 nt, Artificial Sequence
  Synthetic
ggacgagacgggcggaccgc

SEQ ID NO: 6917 - RNA, 20 nt, Artificial Sequence
  Synthetic
gacgagacgggcggaccgcc

SEQ ID NO: 6918 - RNA, 20 nt, Artificial Sequence
  Synthetic
cgggcggaccgccgggcgag

SEQ ID NO: 6919 - RNA, 20 nt, Artificial Sequence
  Synthetic
gcggcgucgaguaucggcuc

SEQ ID NO: 6920 - RNA, 20 nt, Artificial Sequence
  Synthetic
gcuccgguccguccucuccg

SEQ ID NO: 6921 - RNA, 20 nt, Artificial Sequence
  Synthetic
cuccgguccguccucuccgu

SEQ ID NO: 6922 - RNA, 20 nt, Artificial Sequence
  Synthetic
ccgguccguccucuccgugg

SEQ ID NO: 6923 - RNA, 20 nt, Artificial Sequence
  Synthetic
ccccgcugcuguccgauucc

SEQ ID NO: 6924 - RNA, 20 nt, Artificial Sequence
  Synthetic
ucgucgcggcggcucuccgc

SEQ ID NO: 6925 - RNA, 20 nt, Artificial Sequence
  Synthetic
gcggcggcucuccgccggcu

SEQ ID NO: 6926 - RNA, 20 nt, Artificial Sequence
  Synthetic
cggcggcucuccgccggcuc

SEQ ID NO: 6927 - RNA, 20 nt, Artificial Sequence
  Synthetic
ggcggcucuccgccggcucg

SEQ ID NO: 6928 - RNA, 20 nt, Artificial Sequence
  Synthetic
gcggcucuccgccggcucgg

SEQ ID NO: 6929 - RNA, 20 nt, Artificial Sequence
  Synthetic
ggcucuccgccggcucgggg

SEQ ID NO: 6930 - RNA, 17 nt, Artificial Sequence
  Synthetic
gauaugcuaauugaccu

SEQ ID NO: 6931 - RNA, 17 nt, Artificial Sequence
  Synthetic
gcuaauugaccucggcc

SEQ ID NO: 6932 - RNA, 17 nt, Artificial Sequence
  Synthetic
cgaggacccccccgagc

SEQ ID NO: 6933 - RNA, 17 nt, Artificial Sequence
  Synthetic
ggacccccccgagccgg

SEQ ID NO: 6934 - RNA, 17 nt, Artificial Sequence
  Synthetic
gagccgccgcgacgacc

SEQ ID NO: 6935 - RNA, 17 nt, Artificial Sequence
  Synthetic
cuggaaucggacagcag

SEQ ID NO: 6936 - RNA, 17 nt, Artificial Sequence
  Synthetic
uggaaucggacagcagc

SEQ ID NO: 6937 - RNA, 17 nt, Artificial Sequence
  Synthetic
ggaaucggacagcagcg

SEQ ID NO: 6938 - RNA, 17 nt, Artificial Sequence
  Synthetic
guguuccucgucggacg

SEQ ID NO: 6939 - RNA, 17 nt, Artificial Sequence
  Synthetic
gacauggaagaccccca

SEQ ID NO: 6940 - RNA, 17 nt, Artificial Sequence
  Synthetic
ggaagacccccacggag

SEQ ID NO: 6941 - RNA, 17 nt, Artificial Sequence
  Synthetic
gacccccacggagagga

SEQ ID NO: 6942 - RNA, 17 nt, Artificial Sequence
  Synthetic
ccacggagaggacggac

SEQ ID NO: 6943 - RNA, 17 nt, Artificial Sequence
  Synthetic
ucucguccagaagaccc

SEQ ID NO: 6944 - RNA, 17 nt, Artificial Sequence
  Synthetic
cgccucguccgacggag

SEQ ID NO: 6945 - RNA, 17 nt, Artificial Sequence
  Synthetic
cguccgacggagcggca

SEQ ID NO: 6946 - RNA, 17 nt, Artificial Sequence
  Synthetic
cagcgccccacagugug

SEQ ID NO: 6947 - RNA, 17 nt, Artificial Sequence
  Synthetic
aguguguggucgcgccu

SEQ ID NO: 6948 - RNA, 17 nt, Artificial Sequence
  Synthetic
ugcucccccgagcagca

SEQ ID NO: 6949 - RNA, 17 nt, Artificial Sequence
  Synthetic
gcucccccgagcagcac

SEQ ID NO: 6950 - RNA, 17 nt, Artificial Sequence
  Synthetic
ucccccgagcagcacgg

SEQ ID NO: 6951 - RNA, 17 nt, Artificial Sequence
  Synthetic
cgagcagcacgggggca

SEQ ID NO: 6952 - RNA, 17 nt, Artificial Sequence
  Synthetic
gcagcacgggggcaagg

SEQ ID NO: 6953 - RNA, 17 nt, Artificial Sequence
  Synthetic
aaagcccagccugcccg

SEQ ID NO: 6954 - RNA, 17 nt, Artificial Sequence
  Synthetic
gcccagccugcccgcgg

SEQ ID NO: 6955 - RNA, 17 nt, Artificial Sequence
  Synthetic
gcccgcggcggacgccg

SEQ ID NO: 6956 - RNA, 17 nt, Artificial Sequence
  Synthetic
cccgcggcggacgccgu

SEQ ID NO: 6957 - RNA, 17 nt, Artificial Sequence
  Synthetic
gacgccgugggcgucgc

SEQ ID NO: 6958 - RNA, 17 nt, Artificial Sequence
  Synthetic
acgccgugggcgucgca

SEQ ID NO: 6959 - RNA, 17 nt, Artificial Sequence
  Synthetic
cgccgugggcgucgcag

SEQ ID NO: 6960 - RNA, 17 nt, Artificial Sequence
  Synthetic
gugggcgucgcaggggu

SEQ ID NO: 6961 - RNA, 17 nt, Artificial Sequence
  Synthetic
ugggcgucgcagggguc

SEQ ID NO: 6962 - RNA, 17 nt, Artificial Sequence
  Synthetic
gggcgucgcaggggucg

SEQ ID NO: 6963 - RNA, 17 nt, Artificial Sequence
  Synthetic
cgcaggggucggggucg

SEQ ID NO: 6964 - RNA, 17 nt, Artificial Sequence
  Synthetic
aggggucggggucgcgg

SEQ ID NO: 6965 - RNA, 17 nt, Artificial Sequence
  Synthetic
cggggucgcgguggucc

SEQ ID NO: 6966 - RNA, 17 nt, Artificial Sequence
  Synthetic
ggggucgcggugguccc

SEQ ID NO: 6967 - RNA, 17 nt, Artificial Sequence
  Synthetic
ggucccggggcugccga

SEQ ID NO: 6968 - RNA, 17 nt, Artificial Sequence
  Synthetic
aaaccaucggcagcccc

SEQ ID NO: 6969 - RNA, 17 nt, Artificial Sequence
  Synthetic
gaccccugcgacgccca

SEQ ID NO: 6970 - RNA, 17 nt, Artificial Sequence
  Synthetic
cccacggcguccgccgc

SEQ ID NO: 6971 - RNA, 17 nt, Artificial Sequence
  Synthetic
cggcguccgccgcgggc

SEQ ID NO: 6972 - RNA, 17 nt, Artificial Sequence
  Synthetic
guccgccgcgggcaggc

SEQ ID NO: 6973 - RNA, 17 nt, Artificial Sequence
  Synthetic
uccgccgcgggcaggcu

SEQ ID NO: 6974 - RNA, 17 nt, Artificial Sequence
  Synthetic
gcgggcaggcugggcuu

SEQ ID NO: 6975 - RNA, 17 nt, Artificial Sequence
  Synthetic
gcaggcugggcuuuggu

SEQ ID NO: 6976 - RNA, 17 nt, Artificial Sequence
  Synthetic
ggcugggcuuuggucgg

SEQ ID NO: 6977 - RNA, 17 nt, Artificial Sequence
  Synthetic
gcugggcuuuggucggu

SEQ ID NO: 6978 - RNA, 17 nt, Artificial Sequence
  Synthetic
cugggcuuuggucggug

SEQ ID NO: 6979 - RNA, 17 nt, Artificial Sequence
  Synthetic
ugggcuuuggucggugg

SEQ ID NO: 6980 - RNA, 17 nt, Artificial Sequence
  Synthetic
cuuuggucggugggggu

SEQ ID NO: 6981 - RNA, 17 nt, Artificial Sequence
  Synthetic
uggucgguggggguugg

SEQ ID NO: 6982 - RNA, 17 nt, Artificial Sequence
  Synthetic
ucgguggggguuggagg

SEQ ID NO: 6983 - RNA, 17 nt, Artificial Sequence
  Synthetic
cgguggggguuggaggc

SEQ ID NO: 6984 - RNA, 17 nt, Artificial Sequence
  Synthetic
cuugcccccgugcugcu

SEQ ID NO: 6985 - RNA, 17 nt, Artificial Sequence
  Synthetic
uugcccccgugcugcuc

SEQ ID NO: 6986 - RNA, 17 nt, Artificial Sequence
  Synthetic
ugcucgggggagcaaga

SEQ ID NO: 6987 - RNA, 17 nt, Artificial Sequence
  Synthetic
acggucgccgggccccg

SEQ ID NO: 6988 - RNA, 17 nt, Artificial Sequence
  Synthetic
cgcgaccacacacugug

SEQ ID NO: 6989 - RNA, 17 nt, Artificial Sequence
  Synthetic
cacacacuguggggcgc

SEQ ID NO: 6990 - RNA, 17 nt, Artificial Sequence
  Synthetic
cuguggggcgcugguug

SEQ ID NO: 6991 - RNA, 17 nt, Artificial Sequence
  Synthetic
cgcugguugaggaucgu

SEQ ID NO: 6992 - RNA, 17 nt, Artificial Sequence
  Synthetic
gcugguugaggaucguu

SEQ ID NO: 6993 - RNA, 17 nt, Artificial Sequence
  Synthetic
cugguugaggaucguug

SEQ ID NO: 6994 - RNA, 17 nt, Artificial Sequence
  Synthetic
acgaggcgucugggugc

SEQ ID NO: 6995 - RNA, 17 nt, Artificial Sequence
  Synthetic
cgaggcgucugggugcu

SEQ ID NO: 6996 - RNA, 17 nt, Artificial Sequence
  Synthetic
cugggugcuggguacgc

SEQ ID NO: 6997 - RNA, 17 nt, Artificial Sequence
  Synthetic
ugggugcuggguacgcc

SEQ ID NO: 6998 - RNA, 17 nt, Artificial Sequence
  Synthetic
gggugcuggguacgccg

SEQ ID NO: 6999 - RNA, 17 nt, Artificial Sequence
  Synthetic
gguacgccggggucuuc

SEQ ID NO: 7000 - RNA, 17 nt, Artificial Sequence
  Synthetic
gggucuucuggacgaga

SEQ ID NO: 7001 - RNA, 17 nt, Artificial Sequence
  Synthetic
ggucuucuggacgagac

SEQ ID NO: 7002 - RNA, 17 nt, Artificial Sequence
  Synthetic
cgagacgggcggaccgc

SEQ ID NO: 7003 - RNA, 17 nt, Artificial Sequence
  Synthetic
gagacgggcggaccgcc

SEQ ID NO: 7004 - RNA, 17 nt, Artificial Sequence
  Synthetic
gcggaccgccgggcgag

SEQ ID NO: 7005 - RNA, 17 nt, Artificial Sequence
  Synthetic
gcgucgaguaucggcuc

SEQ ID NO: 7006 - RNA, 17 nt, Artificial Sequence
  Synthetic
ccgguccguccucuccg

SEQ ID NO: 7007 - RNA, 17 nt, Artificial Sequence
  Synthetic
cgguccguccucuccgu

SEQ ID NO: 7008 - RNA, 17 nt, Artificial Sequence
  Synthetic
guccguccucuccgugg

SEQ ID NO: 7009 - RNA, 17 nt, Artificial Sequence
  Synthetic
cgcugcuguccgauucc

SEQ ID NO: 7010 - RNA, 17 nt, Artificial Sequence
  Synthetic
ucgcggcggcucuccgc

SEQ ID NO: 7011 - RNA, 17 nt, Artificial Sequence
  Synthetic
gcggcucuccgccggcu

SEQ ID NO: 7012 - RNA, 17 nt, Artificial Sequence
  Synthetic
cggcucuccgccggcuc

SEQ ID NO: 7013 - RNA, 17 nt, Artificial Sequence
  Synthetic
ggcucuccgccggcucg

SEQ ID NO: 7014 - RNA, 17 nt, Artificial Sequence
  Synthetic
gcucuccgccggcucgg

SEQ ID NO: 7015 - RNA, 17 nt, Artificial Sequence
  Synthetic
ucuccgccggcucgggg

SEQ ID NO: 7016 - RNA, 20 nt, Artificial Sequence
  Synthetic
agaaccaaucgcaacccugg

SEQ ID NO: 7017 - RNA, 20 nt, Artificial Sequence
  Synthetic
aacccugggggaccccgccc

SEQ ID NO: 7018 - RNA, 20 nt, Artificial Sequence
  Synthetic
acccugggggaccccgcccc

SEQ ID NO: 7019 - RNA, 20 nt, Artificial Sequence
  Synthetic
cccugggggaccccgccccg

SEQ ID NO: 7020 - RNA, 20 nt, Artificial Sequence
  Synthetic
ugggggaccccgccccgggg

SEQ ID NO: 7021 - RNA, 20 nt, Artificial Sequence
  Synthetic
gggggaccccgccccggggc

SEQ ID NO: 7022 - RNA, 20 nt, Artificial Sequence
  Synthetic
ggggaccccgccccggggcg

SEQ ID NO: 7023 - RNA, 20 nt, Artificial Sequence
  Synthetic
gaccccgccccggggcgggg

SEQ ID NO: 7024 - RNA, 20 nt, Artificial Sequence
  Synthetic
ccgccccggggcggggugga

SEQ ID NO: 7025 - RNA, 20 nt, Artificial Sequence
  Synthetic
cccggggcgggguggacgga

SEQ ID NO: 7026 - RNA, 20 nt, Artificial Sequence
  Synthetic
gcgggguggacggacggccc

SEQ ID NO: 7027 - RNA, 20 nt, Artificial Sequence
  Synthetic
gacggccccggcgcccccca

SEQ ID NO: 7028 - RNA, 20 nt, Artificial Sequence
  Synthetic
ccccggcgccccccauggcg

SEQ ID NO: 7029 - RNA, 20 nt, Artificial Sequence
  Synthetic
gcgccccccauggcgaggcg

SEQ ID NO: 7030 - RNA, 20 nt, Artificial Sequence
  Synthetic
ccccauggcgaggcguggcg

SEQ ID NO: 7031 - RNA, 20 nt, Artificial Sequence
  Synthetic
agugagcagcccgacccacc

SEQ ID NO: 7032 - RNA, 20 nt, Artificial Sequence
  Synthetic
gagcagcccgacccacccgg

SEQ ID NO: 7033 - RNA, 20 nt, Artificial Sequence
  Synthetic
ccgacccacccggaggccag

SEQ ID NO: 7034 - RNA, 20 nt, Artificial Sequence
  Synthetic
cacccggaggccagcggaca

SEQ ID NO: 7035 - RNA, 20 nt, Artificial Sequence
  Synthetic
acccggaggccagcggacac

SEQ ID NO: 7036 - RNA, 20 nt, Artificial Sequence
  Synthetic
cccggaggccagcggacacg

SEQ ID NO: 7037 - RNA, 20 nt, Artificial Sequence
  Synthetic
accccccccgcuaaugacgc

SEQ ID NO: 7038 - RNA, 20 nt, Artificial Sequence
  Synthetic
ggcgauugcccccccgcccg

SEQ ID NO: 7039 - RNA, 20 nt, Artificial Sequence
  Synthetic
gcccgcggacccccgcgccc

SEQ ID NO: 7040 - RNA, 20 nt, Artificial Sequence
  Synthetic
ggacccccgcgccccggccc

SEQ ID NO: 7041 - RNA, 20 nt, Artificial Sequence
  Synthetic
cgccccggccccggagcgaa

SEQ ID NO: 7042 - RNA, 20 nt, Artificial Sequence
  Synthetic
acaccaucgacgccaccacg

SEQ ID NO: 7043 - RNA, 20 nt, Artificial Sequence
  Synthetic
caucgacgccaccacgcggu

SEQ ID NO: 7044 - RNA, 20 nt, Artificial Sequence
  Synthetic
gcgcuccaucuccgagcgcg

SEQ ID NO: 7045 - RNA, 20 nt, Artificial Sequence
  Synthetic
cuccaucuccgagcgcgcgg

SEQ ID NO: 7046 - RNA, 20 nt, Artificial Sequence
  Synthetic
gaccgcaucagcgagagcuu

SEQ ID NO: 7047 - RNA, 20 nt, Artificial Sequence
  Synthetic
gagcuuuggccgcagcgcac

SEQ ID NO: 7048 - RNA, 20 nt, Artificial Sequence
  Synthetic
caggucaugcacgaccccuu

SEQ ID NO: 7049 - RNA, 20 nt, Artificial Sequence
  Synthetic
aggucaugcacgaccccuuu

SEQ ID NO: 7050 - RNA, 20 nt, Artificial Sequence
  Synthetic
ggucaugcacgaccccuuug

SEQ ID NO: 7051 - RNA, 20 nt, Artificial Sequence
  Synthetic
gucaugcacgaccccuuugg

SEQ ID NO: 7052 - RNA, 20 nt, Artificial Sequence
  Synthetic
ucaugcacgaccccuuuggg

SEQ ID NO: 7053 - RNA, 20 nt, Artificial Sequence
  Synthetic
uucccgccgcgaauagcccc

SEQ ID NO: 7054 - RNA, 20 nt, Artificial Sequence
  Synthetic
ucccgccgcgaauagccccu

SEQ ID NO: 7055 - RNA, 20 nt, Artificial Sequence
  Synthetic
cgcgaauagccccugggccc

SEQ ID NO: 7056 - RNA, 20 nt, Artificial Sequence
  Synthetic
uagccccugggccccggugc

SEQ ID NO: 7057 - RNA, 20 nt, Artificial Sequence
  Synthetic
ccccugggccccggugcugg

SEQ ID NO: 7058 - RNA, 20 nt, Artificial Sequence
  Synthetic
cccugggccccggugcuggc

SEQ ID NO: 7059 - RNA, 20 nt, Artificial Sequence
  Synthetic
gccccggugcuggcgggcca

SEQ ID NO: 7060 - RNA, 20 nt, Artificial Sequence
  Synthetic
ccggugcuggcgggccaagg

SEQ ID NO: 7061 - RNA, 20 nt, Artificial Sequence
  Synthetic
cggugcuggcgggccaagga

SEQ ID NO: 7062 - RNA, 20 nt, Artificial Sequence
  Synthetic
ccuuugacgccgagaccaga

SEQ ID NO: 7063 - RNA, 20 nt, Artificial Sequence
  Synthetic
cuuugacgccgagaccagac

SEQ ID NO: 7064 - RNA, 20 nt, Artificial Sequence
  Synthetic
ccgagaccagacgggucucc

SEQ ID NO: 7065 - RNA, 20 nt, Artificial Sequence
  Synthetic
cgagaccagacgggucuccu

SEQ ID NO: 7066 - RNA, 20 nt, Artificial Sequence
  Synthetic
acgggucuccugggaaaccu

SEQ ID NO: 7067 - RNA, 20 nt, Artificial Sequence
  Synthetic
ugggaaaccuuggucgccca

SEQ ID NO: 7068 - RNA, 20 nt, Artificial Sequence
  Synthetic
agccucuaucgcacuuuugc

SEQ ID NO: 7069 - RNA, 20 nt, Artificial Sequence
  Synthetic
gcacuuuugccggcaauccu

SEQ ID NO: 7070 - RNA, 20 nt, Artificial Sequence
  Synthetic
cacuuuugccggcaauccuc

SEQ ID NO: 7071 - RNA, 20 nt, Artificial Sequence
  Synthetic
ucgggccgcaucgaccgcca

SEQ ID NO: 7072 - RNA, 20 nt, Artificial Sequence
  Synthetic
gcgccaagaaaauuucaucg

SEQ ID NO: 7073 - RNA, 20 nt, Artificial Sequence
  Synthetic
agaaaauuucaucgaggcgc

SEQ ID NO: 7074 - RNA, 20 nt, Artificial Sequence
  Synthetic
ggccuccgccgacgagacgc

SEQ ID NO: 7075 - RNA, 20 nt, Artificial Sequence
  Synthetic
ccgccgacgagacgcuggcg

SEQ ID NO: 7076 - RNA, 20 nt, Artificial Sequence
  Synthetic
caaccugccgcugcgccccc

SEQ ID NO: 7077 - RNA, 20 nt, Artificial Sequence
  Synthetic
cgcccccaggaccccauuau

SEQ ID NO: 7078 - RNA, 20 nt, Artificial Sequence
  Synthetic
gcccccaggaccccauuauc

SEQ ID NO: 7079 - RNA, 20 nt, Artificial Sequence
  Synthetic
ccccauuaucgggacgaccg

SEQ ID NO: 7080 - RNA, 20 nt, Artificial Sequence
  Synthetic
cgggacgaccgcggcugugc

SEQ ID NO: 7081 - RNA, 20 nt, Artificial Sequence
  Synthetic
auaaccucgccacgcgccug

SEQ ID NO: 7082 - RNA, 20 nt, Artificial Sequence
  Synthetic
cuuucuccagugcuaccuga

SEQ ID NO: 7083 - RNA, 20 nt, Artificial Sequence
  Synthetic
cagugcuaccugaaggcgcg

SEQ ID NO: 7084 - RNA, 20 nt, Artificial Sequence
  Synthetic
cugaaggcgcgaggccugug

SEQ ID NO: 7085 - RNA, 20 nt, Artificial Sequence
  Synthetic
ggcgcgaggccugugcggcc

SEQ ID NO: 7086 - RNA, 20 nt, Artificial Sequence
  Synthetic
gccuggacgaacuguguucg

SEQ ID NO: 7087 - RNA, 20 nt, Artificial Sequence
  Synthetic
uggacgaacuguguucgcgg

SEQ ID NO: 7088 - RNA, 20 nt, Artificial Sequence
  Synthetic
acuguguucgcggcggcguc

SEQ ID NO: 7089 - RNA, 20 nt, Artificial Sequence
  Synthetic
guguucgcggcggcgucugg

SEQ ID NO: 7090 - RNA, 20 nt, Artificial Sequence
  Synthetic
gcggcgucuggcggacauua

SEQ ID NO: 7091 - RNA, 20 nt, Artificial Sequence
  Synthetic
auccuucguguuugucauuc

SEQ ID NO: 7092 - RNA, 20 nt, Artificial Sequence
  Synthetic
ucguguuugucauucuggcc

SEQ ID NO: 7093 - RNA, 20 nt, Artificial Sequence
  Synthetic
cucgccaaccgcgucgagcg

SEQ ID NO: 7094 - RNA, 20 nt, Artificial Sequence
  Synthetic
ccgcgucgagcguggcgucg

SEQ ID NO: 7095 - RNA, 20 nt, Artificial Sequence
  Synthetic
gagaucgacuacgcgacccu

SEQ ID NO: 7096 - RNA, 20 nt, Artificial Sequence
  Synthetic
gacuacgcgacccuuggugu

SEQ ID NO: 7097 - RNA, 20 nt, Artificial Sequence
  Synthetic
acuacgcgacccuugguguc

SEQ ID NO: 7098 - RNA, 20 nt, Artificial Sequence
  Synthetic
cuacgcgacccuuggugucg

SEQ ID NO: 7099 - RNA, 20 nt, Artificial Sequence
  Synthetic
gcgacccuuggugucggggu

SEQ ID NO: 7100 - RNA, 20 nt, Artificial Sequence
  Synthetic
aagaugcauuucuaccuccc

SEQ ID NO: 7101 - RNA, 20 nt, Artificial Sequence
  Synthetic
agaugcauuucuaccucccc

SEQ ID NO: 7102 - RNA, 20 nt, Artificial Sequence
  Synthetic
gaugcauuucuaccuccccg

SEQ ID NO: 7103 - RNA, 20 nt, Artificial Sequence
  Synthetic
cuaccuccccggggccugca

SEQ ID NO: 7104 - RNA, 20 nt, Artificial Sequence
  Synthetic
ccuccccggggccugcaugg

SEQ ID NO: 7105 - RNA, 20 nt, Artificial Sequence
  Synthetic
cuccccggggccugcauggc

SEQ ID NO: 7106 - RNA, 20 nt, Artificial Sequence
  Synthetic
aauccuagacacgcaccgcc

SEQ ID NO: 7107 - RNA, 20 nt, Artificial Sequence
  Synthetic
gagucgugucugcgaguuga

SEQ ID NO: 7108 - RNA, 20 nt, Artificial Sequence
  Synthetic
gucgcccccccguacgugca

SEQ ID NO: 7109 - RNA, 20 nt, Artificial Sequence
  Synthetic
aaauauuugccgugcacgua

SEQ ID NO: 7110 - RNA, 20 nt, Artificial Sequence
  Synthetic
aauauuugccgugcacguac

SEQ ID NO: 7111 - RNA, 20 nt, Artificial Sequence
  Synthetic
auauuugccgugcacguacg

SEQ ID NO: 7112 - RNA, 20 nt, Artificial Sequence
  Synthetic
uauuugccgugcacguacgg

SEQ ID NO: 7113 - RNA, 20 nt, Artificial Sequence
  Synthetic
auuugccgugcacguacggg

SEQ ID NO: 7114 - RNA, 20 nt, Artificial Sequence
  Synthetic
uuugccgugcacguacgggg

SEQ ID NO: 7115 - RNA, 20 nt, Artificial Sequence
  Synthetic
cgggggggcgacgaugugac

SEQ ID NO: 7116 - RNA, 20 nt, Artificial Sequence
  Synthetic
agacacgacucgaacacucc

SEQ ID NO: 7117 - RNA, 20 nt, Artificial Sequence
  Synthetic
cacgacucgaacacuccugg

SEQ ID NO: 7118 - RNA, 20 nt, Artificial Sequence
  Synthetic
acuccuggcggugcgugucu

SEQ ID NO: 7119 - RNA, 20 nt, Artificial Sequence
  Synthetic
gcgugucuaggauuucgauc

SEQ ID NO: 7120 - RNA, 20 nt, Artificial Sequence
  Synthetic
uucgaucaggcccgccaugc

SEQ ID NO: 7121 - RNA, 20 nt, Artificial Sequence
  Synthetic
caggcccgccaugcaggccc

SEQ ID NO: 7122 - RNA, 20 nt, Artificial Sequence
  Synthetic
aggcccgccaugcaggcccc

SEQ ID NO: 7123 - RNA, 20 nt, Artificial Sequence
  Synthetic
ggcccgccaugcaggccccg

SEQ ID NO: 7124 - RNA, 20 nt, Artificial Sequence
  Synthetic
ccgccaugcaggccccgggg

SEQ ID NO: 7125 - RNA, 20 nt, Artificial Sequence
  Synthetic
ucucuccgaccccgacacca

SEQ ID NO: 7126 - RNA, 20 nt, Artificial Sequence
  Synthetic
cucuccgaccccgacaccaa

SEQ ID NO: 7127 - RNA, 20 nt, Artificial Sequence
  Synthetic
ccgcgacgccacgcucgacg

SEQ ID NO: 7128 - RNA, 20 nt, Artificial Sequence
  Synthetic
gacgccacgcucgacgcggu

SEQ ID NO: 7129 - RNA, 20 nt, Artificial Sequence
  Synthetic
cucgacgcgguuggcgagcc

SEQ ID NO: 7130 - RNA, 20 nt, Artificial Sequence
  Synthetic
ggccagaaugacaaacacga

SEQ ID NO: 7131 - RNA, 20 nt, Artificial Sequence
  Synthetic
gccgcgaacacaguucgucc

SEQ ID NO: 7132 - RNA, 20 nt, Artificial Sequence
  Synthetic
acaguucguccaggccgcac

SEQ ID NO: 7133 - RNA, 20 nt, Artificial Sequence
  Synthetic
cgcacaggccucgcgccuuc

SEQ ID NO: 7134 - RNA, 20 nt, Artificial Sequence
  Synthetic
cucgcgccuucagguagcac

SEQ ID NO: 7135 - RNA, 20 nt, Artificial Sequence
  Synthetic
cuucagguagcacuggagaa

SEQ ID NO: 7136 - RNA, 20 nt, Artificial Sequence
  Synthetic
uucagguagcacuggagaaa

SEQ ID NO: 7137 - RNA, 20 nt, Artificial Sequence
  Synthetic
agcacuggagaaagggccgc

SEQ ID NO: 7138 - RNA, 20 nt, Artificial Sequence
  Synthetic
gagaaagggccgcaggcgcg

SEQ ID NO: 7139 - RNA, 20 nt, Artificial Sequence
  Synthetic
agggccgcaggcgcguggcg

SEQ ID NO: 7140 - RNA, 20 nt, Artificial Sequence
  Synthetic
gagguuauccagcacagccg

SEQ ID NO: 7141 - RNA, 20 nt, Artificial Sequence
  Synthetic
agccgcggucgucccgauaa

SEQ ID NO: 7142 - RNA, 20 nt, Artificial Sequence
  Synthetic
gccgcggucgucccgauaau

SEQ ID NO: 7143 - RNA, 20 nt, Artificial Sequence
  Synthetic
ccgcggucgucccgauaaug

SEQ ID NO: 7144 - RNA, 20 nt, Artificial Sequence
  Synthetic
ucgucccgauaauggggucc

SEQ ID NO: 7145 - RNA, 20 nt, Artificial Sequence
  Synthetic
cgucccgauaaugggguccu

SEQ ID NO: 7146 - RNA, 20 nt, Artificial Sequence
  Synthetic
gucccgauaaugggguccug

SEQ ID NO: 7147 - RNA, 20 nt, Artificial Sequence
  Synthetic
ucccgauaaugggguccugg

SEQ ID NO: 7148 - RNA, 20 nt, Artificial Sequence
  Synthetic
augggguccugggggcgcag

SEQ ID NO: 7149 - RNA, 20 nt, Artificial Sequence
  Synthetic
gguccugggggcgcagcggc

SEQ ID NO: 7150 - RNA, 20 nt, Artificial Sequence
  Synthetic
gggggcgcagcggcagguug

SEQ ID NO: 7151 - RNA, 20 nt, Artificial Sequence
  Synthetic
ggcgcagcggcagguugugg

SEQ ID NO: 7152 - RNA, 20 nt, Artificial Sequence
  Synthetic
gcaccacgccagcgucucgu

SEQ ID NO: 7153 - RNA, 20 nt, Artificial Sequence
  Synthetic
ccacgccagcgucucgucgg

SEQ ID NO: 7154 - RNA, 20 nt, Artificial Sequence
  Synthetic
cgccagcgucucgucggcgg

SEQ ID NO: 7155 - RNA, 20 nt, Artificial Sequence
  Synthetic
gcgccucgaugaaauuuucu

SEQ ID NO: 7156 - RNA, 20 nt, Artificial Sequence
  Synthetic
gcgcagcacgcagucgcgca

SEQ ID NO: 7157 - RNA, 20 nt, Artificial Sequence
  Synthetic
cacgcagucgcgcauggccu

SEQ ID NO: 7158 - RNA, 20 nt, Artificial Sequence
  Synthetic
gcagucgcgcauggccuugg

SEQ ID NO: 7159 - RNA, 20 nt, Artificial Sequence
  Synthetic
cauggccuuggcggucgaug

SEQ ID NO: 7160 - RNA, 20 nt, Artificial Sequence
  Synthetic
uuggcggucgaugcggcccg

SEQ ID NO: 7161 - RNA, 20 nt, Artificial Sequence
  Synthetic
cgaugcggcccgaggauugc

SEQ ID NO: 7162 - RNA, 20 nt, Artificial Sequence
  Synthetic
ugccggcaaaagugcgauag

SEQ ID NO: 7163 - RNA, 20 nt, Artificial Sequence
  Synthetic
gcaaaagugcgauagaggcu

SEQ ID NO: 7164 - RNA, 20 nt, Artificial Sequence
  Synthetic
caaaagugcgauagaggcuc

SEQ ID NO: 7165 - RNA, 20 nt, Artificial Sequence
  Synthetic
ugcgauagaggcucgggccg

SEQ ID NO: 7166 - RNA, 20 nt, Artificial Sequence
  Synthetic
gcgauagaggcucgggccgu

SEQ ID NO: 7167 - RNA, 20 nt, Artificial Sequence
  Synthetic
gcucgggccgugggcgacca

SEQ ID NO: 7168 - RNA, 20 nt, Artificial Sequence
  Synthetic
gugggcgaccaagguuuccc

SEQ ID NO: 7169 - RNA, 20 nt, Artificial Sequence
  Synthetic
gguuucccaggagacccguc

SEQ ID NO: 7170 - RNA, 20 nt, Artificial Sequence
  Synthetic
ccaggagacccgucuggucu

SEQ ID NO: 7171 - RNA, 20 nt, Artificial Sequence
  Synthetic
ccgucuggucucggcgucaa

SEQ ID NO: 7172 - RNA, 20 nt, Artificial Sequence
  Synthetic
cgucuggucucggcgucaaa

SEQ ID NO: 7173 - RNA, 20 nt, Artificial Sequence
  Synthetic
cggcgucaaagggcccuccu

SEQ ID NO: 7174 - RNA, 20 nt, Artificial Sequence
  Synthetic
ccuccuuggcccgccagcac

SEQ ID NO: 7175 - RNA, 20 nt, Artificial Sequence
  Synthetic
cuccuuggcccgccagcacc

SEQ ID NO: 7176 - RNA, 20 nt, Artificial Sequence
  Synthetic
uccuuggcccgccagcaccg

SEQ ID NO: 7177 - RNA, 20 nt, Artificial Sequence
  Synthetic
gcccgccagcaccggggccc

SEQ ID NO: 7178 - RNA, 20 nt, Artificial Sequence
  Synthetic
cccgccagcaccggggccca

SEQ ID NO: 7179 - RNA, 20 nt, Artificial Sequence
  Synthetic
ccgccagcaccggggcccag

SEQ ID NO: 7180 - RNA, 20 nt, Artificial Sequence
  Synthetic
cggggcccaggggcuauucg

SEQ ID NO: 7181 - RNA, 20 nt, Artificial Sequence
  Synthetic
ggcccaggggcuauucgcgg

SEQ ID NO: 7182 - RNA, 20 nt, Artificial Sequence
  Synthetic
gcccaggggcuauucgcggc

SEQ ID NO: 7183 - RNA, 20 nt, Artificial Sequence
  Synthetic
gggcuauucgcggcgggaaa

SEQ ID NO: 7184 - RNA, 20 nt, Artificial Sequence
  Synthetic
gggaaacggcugccccccaa

SEQ ID NO: 7185 - RNA, 20 nt, Artificial Sequence
  Synthetic
ggaaacggcugccccccaaa

SEQ ID NO: 7186 - RNA, 20 nt, Artificial Sequence
  Synthetic
gaaacggcugccccccaaag

SEQ ID NO: 7187 - RNA, 20 nt, Artificial Sequence
  Synthetic
cgugcaugaccugugcgcug

SEQ ID NO: 7188 - RNA, 20 nt, Artificial Sequence
  Synthetic
ggccaaagcucucgcugaug

SEQ ID NO: 7189 - RNA, 20 nt, Artificial Sequence
  Synthetic
gcggucgaccgccgcgcgcu

SEQ ID NO: 7190 - RNA, 20 nt, Artificial Sequence
  Synthetic
gaccgccgcgcgcucggaga

SEQ ID NO: 7191 - RNA, 20 nt, Artificial Sequence
  Synthetic
cgcgcucggagauggagcgc

SEQ ID NO: 7192 - RNA, 20 nt, Artificial Sequence
  Synthetic
ggagcgcaggaccaaccgcg

SEQ ID NO: 7193 - RNA, 20 nt, Artificial Sequence
  Synthetic
gcgcaggaccaaccgcgugg

SEQ ID NO: 7194 - RNA, 20 nt, Artificial Sequence
  Synthetic
caaccgcgugguggcgucga

SEQ ID NO: 7195 - RNA, 20 nt, Artificial Sequence
  Synthetic
cgugguggcgucgauggugu

SEQ ID NO: 7196 - RNA, 20 nt, Artificial Sequence
  Synthetic
gguggcgucgauggugucgg

SEQ ID NO: 7197 - RNA, 20 nt, Artificial Sequence
  Synthetic
ggcgucgauggugucggcgg

SEQ ID NO: 7198 - RNA, 20 nt, Artificial Sequence
  Synthetic
gcgucgauggugucggcggc

SEQ ID NO: 7199 - RNA, 20 nt, Artificial Sequence
  Synthetic
gcggcgggcgccuuucgcuc

SEQ ID NO: 7200 - RNA, 20 nt, Artificial Sequence
  Synthetic
cggcgggcgccuuucgcucc

SEQ ID NO: 7201 - RNA, 20 nt, Artificial Sequence
  Synthetic
ggcgggcgccuuucgcuccg

SEQ ID NO: 7202 - RNA, 20 nt, Artificial Sequence
  Synthetic
ggcgccuuucgcuccggggc

SEQ ID NO: 7203 - RNA, 20 nt, Artificial Sequence
  Synthetic
gcgccuuucgcuccggggcc

SEQ ID NO: 7204 - RNA, 20 nt, Artificial Sequence
  Synthetic
cgccuuucgcuccggggccg

SEQ ID NO: 7205 - RNA, 20 nt, Artificial Sequence
  Synthetic
uucgcuccggggccggggcg

SEQ ID NO: 7206 - RNA, 20 nt, Artificial Sequence
  Synthetic
ucgcuccggggccggggcgc

SEQ ID NO: 7207 - RNA, 20 nt, Artificial Sequence
  Synthetic
cgcuccggggccggggcgcg

SEQ ID NO: 7208 - RNA, 20 nt, Artificial Sequence
  Synthetic
gcuccggggccggggcgcgg

SEQ ID NO: 7209 - RNA, 20 nt, Artificial Sequence
  Synthetic
ggccggggcgcggggguccg

SEQ ID NO: 7210 - RNA, 20 nt, Artificial Sequence
  Synthetic
gccggggcgcggggguccgc

SEQ ID NO: 7211 - RNA, 20 nt, Artificial Sequence
  Synthetic
ggggcgcggggguccgcggg

SEQ ID NO: 7212 - RNA, 20 nt, Artificial Sequence
  Synthetic
gggcgcggggguccgcgggc

SEQ ID NO: 7213 - RNA, 20 nt, Artificial Sequence
  Synthetic
ggcgcggggguccgcgggcg

SEQ ID NO: 7214 - RNA, 20 nt, Artificial Sequence
  Synthetic
gcgcggggguccgcgggcgg

SEQ ID NO: 7215 - RNA, 20 nt, Artificial Sequence
  Synthetic
cgcggggguccgcgggcggg

SEQ ID NO: 7216 - RNA, 20 nt, Artificial Sequence
  Synthetic
gcggggguccgcgggcgggg

SEQ ID NO: 7217 - RNA, 20 nt, Artificial Sequence
  Synthetic
gcaaucgccagcgucauuag

SEQ ID NO: 7218 - RNA, 20 nt, Artificial Sequence
  Synthetic
caaucgccagcgucauuagc

SEQ ID NO: 7219 - RNA, 20 nt, Artificial Sequence
  Synthetic
aaucgccagcgucauuagcg

SEQ ID NO: 7220 - RNA, 20 nt, Artificial Sequence
  Synthetic
aucgccagcgucauuagcgg

SEQ ID NO: 7221 - RNA, 20 nt, Artificial Sequence
  Synthetic
ucgccagcgucauuagcggg

SEQ ID NO: 7222 - RNA, 20 nt, Artificial Sequence
  Synthetic
cgccagcgucauuagcgggg

SEQ ID NO: 7223 - RNA, 20 nt, Artificial Sequence
  Synthetic
gccagcgucauuagcggggg

SEQ ID NO: 7224 - RNA, 20 nt, Artificial Sequence
  Synthetic
ucauuagcggggggggugcu

SEQ ID NO: 7225 - RNA, 20 nt, Artificial Sequence
  Synthetic
ggcgcacgccccguguccgc

SEQ ID NO: 7226 - RNA, 20 nt, Artificial Sequence
  Synthetic
gccccguguccgcuggccuc

SEQ ID NO: 7227 - RNA, 20 nt, Artificial Sequence
  Synthetic
ccccguguccgcuggccucc

SEQ ID NO: 7228 - RNA, 20 nt, Artificial Sequence
  Synthetic
cguguccgcuggccuccggg

SEQ ID NO: 7229 - RNA, 20 nt, Artificial Sequence
  Synthetic
guguccgcuggccuccgggu

SEQ ID NO: 7230 - RNA, 20 nt, Artificial Sequence
  Synthetic
ccgcuggccuccgggugggu

SEQ ID NO: 7231 - RNA, 20 nt, Artificial Sequence
  Synthetic
cgcuggccuccggguggguc

SEQ ID NO: 7232 - RNA, 20 nt, Artificial Sequence
  Synthetic
ugccgcgccacgccucgcca

SEQ ID NO: 7233 - RNA, 20 nt, Artificial Sequence
  Synthetic
gccgcgccacgccucgccau

SEQ ID NO: 7234 - RNA, 20 nt, Artificial Sequence
  Synthetic
ccgcgccacgccucgccaug

SEQ ID NO: 7235 - RNA, 20 nt, Artificial Sequence
  Synthetic
cgcgccacgccucgccaugg

SEQ ID NO: 7236 - RNA, 20 nt, Artificial Sequence
  Synthetic
gcgccacgccucgccauggg

SEQ ID NO: 7237 - RNA, 20 nt, Artificial Sequence
  Synthetic
cgccucgccauggggggcgc

SEQ ID NO: 7238 - RNA, 20 nt, Artificial Sequence
  Synthetic
gccucgccauggggggcgcc

SEQ ID NO: 7239 - RNA, 20 nt, Artificial Sequence
  Synthetic
ccucgccauggggggcgccg

SEQ ID NO: 7240 - RNA, 20 nt, Artificial Sequence
  Synthetic
gccguccguccaccccgccc

SEQ ID NO: 7241 - RNA, 20 nt, Artificial Sequence
  Synthetic
ccguccguccaccccgcccc

SEQ ID NO: 7242 - RNA, 20 nt, Artificial Sequence
  Synthetic
cguccguccaccccgccccg

SEQ ID NO: 7243 - RNA, 20 nt, Artificial Sequence
  Synthetic
ccguccaccccgccccgggg

SEQ ID NO: 7244 - RNA, 20 nt, Artificial Sequence
  Synthetic
cguccaccccgccccggggc

SEQ ID NO: 7245 - RNA, 20 nt, Artificial Sequence
  Synthetic
guccaccccgccccggggcg

SEQ ID NO: 7246 - RNA, 20 nt, Artificial Sequence
  Synthetic
gccccggggcgggguccccc

SEQ ID NO: 7247 - RNA, 20 nt, Artificial Sequence
  Synthetic
ccccggggcgggguccccca

SEQ ID NO: 7248 - RNA, 20 nt, Artificial Sequence
  Synthetic
gggucccccaggguugcgau

SEQ ID NO: 7249 - RNA, 17 nt, Artificial Sequence
  Synthetic
agaaccaaucgcaaccc

SEQ ID NO: 7250 - RNA, 17 nt, Artificial Sequence
  Synthetic
gaaccaaucgcaacccu

SEQ ID NO: 7251 - RNA, 17 nt, Artificial Sequence
  Synthetic
aaccaaucgcaacccug

SEQ ID NO: 7252 - RNA, 17 nt, Artificial Sequence
  Synthetic
accaaucgcaacccugg

SEQ ID NO: 7253 - RNA, 17 nt, Artificial Sequence
  Synthetic
ccugggggaccccgccc

SEQ ID NO: 7254 - RNA, 17 nt, Artificial Sequence
  Synthetic
cugggggaccccgcccc

SEQ ID NO: 7255 - RNA, 17 nt, Artificial Sequence
  Synthetic
ugggggaccccgccccg

SEQ ID NO: 7256 - RNA, 17 nt, Artificial Sequence
  Synthetic
gggaccccgccccgggg

SEQ ID NO: 7257 - RNA, 17 nt, Artificial Sequence
  Synthetic
ggaccccgccccggggc

SEQ ID NO: 7258 - RNA, 17 nt, Artificial Sequence
  Synthetic
gaccccgccccggggcg

SEQ ID NO: 7259 - RNA, 17 nt, Artificial Sequence
  Synthetic
cccgccccggggcgggg

SEQ ID NO: 7260 - RNA, 17 nt, Artificial Sequence
  Synthetic
ccccggggcggggugga

SEQ ID NO: 7261 - RNA, 17 nt, Artificial Sequence
  Synthetic
ggggcgggguggacgga

SEQ ID NO: 7262 - RNA, 17 nt, Artificial Sequence
  Synthetic
ggguggacggacggccc

SEQ ID NO: 7263 - RNA, 17 nt, Artificial Sequence
  Synthetic
ggccccggcgcccccca

SEQ ID NO: 7264 - RNA, 17 nt, Artificial Sequence
  Synthetic
cggcgccccccauggcg

SEQ ID NO: 7265 - RNA, 17 nt, Artificial Sequence
  Synthetic
ccccccauggcgaggcg

SEQ ID NO: 7266 - RNA, 17 nt, Artificial Sequence
  Synthetic
cauggcgaggcguggcg

SEQ ID NO: 7267 - RNA, 17 nt, Artificial Sequence
  Synthetic
gagcagcccgacccacc

SEQ ID NO: 7268 - RNA, 17 nt, Artificial Sequence
  Synthetic
cagcccgacccacccgg

SEQ ID NO: 7269 - RNA, 17 nt, Artificial Sequence
  Synthetic
acccacccggaggccag

SEQ ID NO: 7270 - RNA, 17 nt, Artificial Sequence
  Synthetic
ccggaggccagcggaca

SEQ ID NO: 7271 - RNA, 17 nt, Artificial Sequence
  Synthetic
cggaggccagcggacac

SEQ ID NO: 7272 - RNA, 17 nt, Artificial Sequence
  Synthetic
ggaggccagcggacacg

SEQ ID NO: 7273 - RNA, 17 nt, Artificial Sequence
  Synthetic
ccccccgcuaaugacgc

SEQ ID NO: 7274 - RNA, 17 nt, Artificial Sequence
  Synthetic
gauugcccccccgcccg

SEQ ID NO: 7275 - RNA, 17 nt, Artificial Sequence
  Synthetic
cgcggacccccgcgccc

SEQ ID NO: 7276 - RNA, 17 nt, Artificial Sequence
  Synthetic
cccccgcgccccggccc

SEQ ID NO: 7277 - RNA, 17 nt, Artificial Sequence
  Synthetic
cccggccccggagcgaa

SEQ ID NO: 7278 - RNA, 17 nt, Artificial Sequence
  Synthetic
ccaucgacgccaccacg

SEQ ID NO: 7279 - RNA, 17 nt, Artificial Sequence
  Synthetic
cgacgccaccacgcggu

SEQ ID NO: 7280 - RNA, 17 nt, Artificial Sequence
  Synthetic
cuccaucuccgagcgcg

SEQ ID NO: 7281 - RNA, 17 nt, Artificial Sequence
  Synthetic
caucuccgagcgcgcgg

SEQ ID NO: 7282 - RNA, 17 nt, Artificial Sequence
  Synthetic
cgcaucagcgagagcuu

SEQ ID NO: 7283 - RNA, 17 nt, Artificial Sequence
  Synthetic
cuuuggccgcagcgcac

SEQ ID NO: 7284 - RNA, 17 nt, Artificial Sequence
  Synthetic
gucaugcacgaccccuu

SEQ ID NO: 7285 - RNA, 17 nt, Artificial Sequence
  Synthetic
ucaugcacgaccccuuu

SEQ ID NO: 7286 - RNA, 17 nt, Artificial Sequence
  Synthetic
caugcacgaccccuuug

SEQ ID NO: 7287 - RNA, 17 nt, Artificial Sequence
  Synthetic
augcacgaccccuuugg

SEQ ID NO: 7288 - RNA, 17 nt, Artificial Sequence
  Synthetic
ugcacgaccccuuuggg

SEQ ID NO: 7289 - RNA, 17 nt, Artificial Sequence
  Synthetic
ccgccgcgaauagcccc

SEQ ID NO: 7290 - RNA, 17 nt, Artificial Sequence
  Synthetic
cgccgcgaauagccccu

SEQ ID NO: 7291 - RNA, 17 nt, Artificial Sequence
  Synthetic
gaauagccccugggccc

SEQ ID NO: 7292 - RNA, 17 nt, Artificial Sequence
  Synthetic
ccccugggccccggugc

SEQ ID NO: 7293 - RNA, 17 nt, Artificial Sequence
  Synthetic
cugggccccggugcugg

SEQ ID NO: 7294 - RNA, 17 nt, Artificial Sequence
  Synthetic
ugggccccggugcuggc

SEQ ID NO: 7295 - RNA, 17 nt, Artificial Sequence
  Synthetic
ccggugcuggcgggcca

SEQ ID NO: 7296 - RNA, 17 nt, Artificial Sequence
  Synthetic
gugcuggcgggccaagg

SEQ ID NO: 7297 - RNA, 17 nt, Artificial Sequence
  Synthetic
ugcuggcgggccaagga

SEQ ID NO: 7298 - RNA, 17 nt, Artificial Sequence
  Synthetic
uugacgccgagaccaga

SEQ ID NO: 7299 - RNA, 17 nt, Artificial Sequence
  Synthetic
ugacgccgagaccagac

SEQ ID NO: 7300 - RNA, 17 nt, Artificial Sequence
  Synthetic
agaccagacgggucucc

SEQ ID NO: 7301 - RNA, 17 nt, Artificial Sequence
  Synthetic
gaccagacgggucuccu

SEQ ID NO: 7302 - RNA, 17 nt, Artificial Sequence
  Synthetic
ggucuccugggaaaccu

SEQ ID NO: 7303 - RNA, 17 nt, Artificial Sequence
  Synthetic
gaaaccuuggucgccca

SEQ ID NO: 7304 - RNA, 17 nt, Artificial Sequence
  Synthetic
cucuaucgcacuuuugc

SEQ ID NO: 7305 - RNA, 17 nt, Artificial Sequence
  Synthetic
cuuuugccggcaauccu

SEQ ID NO: 7306 - RNA, 17 nt, Artificial Sequence
  Synthetic
uuuugccggcaauccuc

SEQ ID NO: 7307 - RNA, 17 nt, Artificial Sequence
  Synthetic
ggccgcaucgaccgcca

SEQ ID NO: 7308 - RNA, 17 nt, Artificial Sequence
  Synthetic
ccaagaaaauuucaucg

SEQ ID NO: 7309 - RNA, 17 nt, Artificial Sequence
  Synthetic
aaauuucaucgaggcgc

SEQ ID NO: 7310 - RNA, 17 nt, Artificial Sequence
  Synthetic
cuccgccgacgagacgc

SEQ ID NO: 7311 - RNA, 17 nt, Artificial Sequence
  Synthetic
ccgacgagacgcuggcg

SEQ ID NO: 7312 - RNA, 17 nt, Artificial Sequence
  Synthetic
ccugccgcugcgccccc

SEQ ID NO: 7313 - RNA, 17 nt, Artificial Sequence
  Synthetic
ccccaggaccccauuau

SEQ ID NO: 7314 - RNA, 17 nt, Artificial Sequence
  Synthetic
cccaggaccccauuauc

SEQ ID NO: 7315 - RNA, 17 nt, Artificial Sequence
  Synthetic
cauuaucgggacgaccg

SEQ ID NO: 7316 - RNA, 17 nt, Artificial Sequence
  Synthetic
gacgaccgcggcugugc

SEQ ID NO: 7317 - RNA, 17 nt, Artificial Sequence
  Synthetic
accucgccacgcgccug

SEQ ID NO: 7318 - RNA, 17 nt, Artificial Sequence
  Synthetic
ucuccagugcuaccuga

SEQ ID NO: 7319 - RNA, 17 nt, Artificial Sequence
  Synthetic
ugcuaccugaaggcgcg

SEQ ID NO: 7320 - RNA, 17 nt, Artificial Sequence
  Synthetic
aaggcgcgaggccugug

SEQ ID NO: 7321 - RNA, 17 nt, Artificial Sequence
  Synthetic
gcgaggccugugcggcc

SEQ ID NO: 7322 - RNA, 17 nt, Artificial Sequence
  Synthetic
uggacgaacuguguucg

SEQ ID NO: 7323 - RNA, 17 nt, Artificial Sequence
  Synthetic
acgaacuguguucgcgg

SEQ ID NO: 7324 - RNA, 17 nt, Artificial Sequence
  Synthetic
guguucgcggcggcguc

SEQ ID NO: 7325 - RNA, 17 nt, Artificial Sequence
  Synthetic
uucgcggcggcgucugg

SEQ ID NO: 7326 - RNA, 17 nt, Artificial Sequence
  Synthetic
gcgucuggcggacauua

SEQ ID NO: 7327 - RNA, 17 nt, Artificial Sequence
  Synthetic
cuucguguuugucauuc

SEQ ID NO: 7328 - RNA, 17 nt, Artificial Sequence
  Synthetic
uguuugucauucuggcc

SEQ ID NO: 7329 - RNA, 17 nt, Artificial Sequence
  Synthetic
gccaaccgcgucgagcg

SEQ ID NO: 7330 - RNA, 17 nt, Artificial Sequence
  Synthetic
cgucgagcguggcgucg

SEQ ID NO: 7331 - RNA, 17 nt, Artificial Sequence
  Synthetic
aucgacuacgcgacccu

SEQ ID NO: 7332 - RNA, 17 nt, Artificial Sequence
  Synthetic
uacgcgacccuuggugu

SEQ ID NO: 7333 - RNA, 17 nt, Artificial Sequence
  Synthetic
acgcgacccuugguguc

SEQ ID NO: 7334 - RNA, 17 nt, Artificial Sequence
  Synthetic
cgcgacccuuggugucg

SEQ ID NO: 7335 - RNA, 17 nt, Artificial Sequence
  Synthetic
acccuuggugucggggu

SEQ ID NO: 7336 - RNA, 17 nt, Artificial Sequence
  Synthetic
augcauuucuaccuccc

SEQ ID NO: 7337 - RNA, 17 nt, Artificial Sequence
  Synthetic
ugcauuucuaccucccc

SEQ ID NO: 7338 - RNA, 17 nt, Artificial Sequence
  Synthetic
gcauuucuaccuccccg

SEQ ID NO: 7339 - RNA, 17 nt, Artificial Sequence
  Synthetic
ccuccccggggccugca

SEQ ID NO: 7340 - RNA, 17 nt, Artificial Sequence
  Synthetic
ccccggggccugcaugg

SEQ ID NO: 7341 - RNA, 17 nt, Artificial Sequence
  Synthetic
cccggggccugcauggc

SEQ ID NO: 7342 - RNA, 17 nt, Artificial Sequence
  Synthetic
ccuagacacgcaccgcc

SEQ ID NO: 7343 - RNA, 17 nt, Artificial Sequence
  Synthetic
ucgugucugcgaguuga

SEQ ID NO: 7344 - RNA, 17 nt, Artificial Sequence
  Synthetic
gcccccccguacgugca

SEQ ID NO: 7345 - RNA, 17 nt, Artificial Sequence
  Synthetic
uauuugccgugcacgua

SEQ ID NO: 7346 - RNA, 17 nt, Artificial Sequence
  Synthetic
auuugccgugcacguac

SEQ ID NO: 7347 - RNA, 17 nt, Artificial Sequence
  Synthetic
uuugccgugcacguacg

SEQ ID NO: 7348 - RNA, 17 nt, Artificial Sequence
  Synthetic
uugccgugcacguacgg

SEQ ID NO: 7349 - RNA, 17 nt, Artificial Sequence
  Synthetic
ugccgugcacguacggg

SEQ ID NO: 7350 - RNA, 17 nt, Artificial Sequence
  Synthetic
gccgugcacguacgggg

SEQ ID NO: 7351 - RNA, 17 nt, Artificial Sequence
  Synthetic
gggggcgacgaugugac

SEQ ID NO: 7352 - RNA, 17 nt, Artificial Sequence
  Synthetic
cacgacucgaacacucc

SEQ ID NO: 7353 - RNA, 17 nt, Artificial Sequence
  Synthetic
gacucgaacacuccugg

SEQ ID NO: 7354 - RNA, 17 nt, Artificial Sequence
  Synthetic
ccuggcggugcgugucu

SEQ ID NO: 7355 - RNA, 17 nt, Artificial Sequence
  Synthetic
ugucuaggauuucgauc

SEQ ID NO: 7356 - RNA, 17 nt, Artificial Sequence
  Synthetic
gaucaggcccgccaugc

SEQ ID NO: 7357 - RNA, 17 nt, Artificial Sequence
  Synthetic
gcccgccaugcaggccc

SEQ ID NO: 7358 - RNA, 17 nt, Artificial Sequence
  Synthetic
cccgccaugcaggcccc

SEQ ID NO: 7359 - RNA, 17 nt, Artificial Sequence
  Synthetic
ccgccaugcaggccccg

SEQ ID NO: 7360 - RNA, 17 nt, Artificial Sequence
  Synthetic
ccaugcaggccccgggg

SEQ ID NO: 7361 - RNA, 17 nt, Artificial Sequence
  Synthetic
cuccgaccccgacacca

SEQ ID NO: 7362 - RNA, 17 nt, Artificial Sequence
  Synthetic
uccgaccccgacaccaa

SEQ ID NO: 7363 - RNA, 17 nt, Artificial Sequence
  Synthetic
cgacgccacgcucgacg

SEQ ID NO: 7364 - RNA, 17 nt, Artificial Sequence
  Synthetic
gccacgcucgacgcggu

SEQ ID NO: 7365 - RNA, 17 nt, Artificial Sequence
  Synthetic
gacgcgguuggcgagcc

SEQ ID NO: 7366 - RNA, 17 nt, Artificial Sequence
  Synthetic
cagaaugacaaacacga

SEQ ID NO: 7367 - RNA, 17 nt, Artificial Sequence
  Synthetic
gcgaacacaguucgucc

SEQ ID NO: 7368 - RNA, 17 nt, Artificial Sequence
  Synthetic
guucguccaggccgcac

SEQ ID NO: 7369 - RNA, 17 nt, Artificial Sequence
  Synthetic
acaggccucgcgccuuc

SEQ ID NO: 7370 - RNA, 17 nt, Artificial Sequence
  Synthetic
gcgccuucagguagcac

SEQ ID NO: 7371 - RNA, 17 nt, Artificial Sequence
  Synthetic
cagguagcacuggagaa

SEQ ID NO: 7372 - RNA, 17 nt, Artificial Sequence
  Synthetic
agguagcacuggagaaa

SEQ ID NO: 7373 - RNA, 17 nt, Artificial Sequence
  Synthetic
acuggagaaagggccgc

SEQ ID NO: 7374 - RNA, 17 nt, Artificial Sequence
  Synthetic
aaagggccgcaggcgcg

SEQ ID NO: 7375 - RNA, 17 nt, Artificial Sequence
  Synthetic
gccgcaggcgcguggcg

SEQ ID NO: 7376 - RNA, 17 nt, Artificial Sequence
  Synthetic
guuauccagcacagccg

SEQ ID NO: 7377 - RNA, 17 nt, Artificial Sequence
  Synthetic
cgcggucgucccgauaa

SEQ ID NO: 7378 - RNA, 17 nt, Artificial Sequence
  Synthetic
gcggucgucccgauaau

SEQ ID NO: 7379 - RNA, 17 nt, Artificial Sequence
  Synthetic
cggucgucccgauaaug

SEQ ID NO: 7380 - RNA, 17 nt, Artificial Sequence
  Synthetic
ucccgauaauggggucc

SEQ ID NO: 7381 - RNA, 17 nt, Artificial Sequence
  Synthetic
cccgauaaugggguccu

SEQ ID NO: 7382 - RNA, 17 nt, Artificial Sequence
  Synthetic
ccgauaaugggguccug

SEQ ID NO: 7383 - RNA, 17 nt, Artificial Sequence
  Synthetic
cgauaaugggguccugg

SEQ ID NO: 7384 - RNA, 17 nt, Artificial Sequence
  Synthetic
ggguccugggggcgcag

SEQ ID NO: 7385 - RNA, 17 nt, Artificial Sequence
  Synthetic
ccugggggcgcagcggc

SEQ ID NO: 7386 - RNA, 17 nt, Artificial Sequence
  Synthetic
ggcgcagcggcagguug

SEQ ID NO: 7387 - RNA, 17 nt, Artificial Sequence
  Synthetic
gcagcggcagguugugg

SEQ ID NO: 7388 - RNA, 17 nt, Artificial Sequence
  Synthetic
ccacgccagcgucucgu

SEQ ID NO: 7389 - RNA, 17 nt, Artificial Sequence
  Synthetic
cgccagcgucucgucgg

SEQ ID NO: 7390 - RNA, 17 nt, Artificial Sequence
  Synthetic
cagcgucucgucggcgg

SEQ ID NO: 7391 - RNA, 17 nt, Artificial Sequence
  Synthetic
ccucgaugaaauuuucu

SEQ ID NO: 7392 - RNA, 17 nt, Artificial Sequence
  Synthetic
cagcacgcagucgcgca

SEQ ID NO: 7393 - RNA, 17 nt, Artificial Sequence
  Synthetic
gcagucgcgcauggccu

SEQ ID NO: 7394 - RNA, 17 nt, Artificial Sequence
  Synthetic
gucgcgcauggccuugg

SEQ ID NO: 7395 - RNA, 17 nt, Artificial Sequence
  Synthetic
ggccuuggcggucgaug

SEQ ID NO: 7396 - RNA, 17 nt, Artificial Sequence
  Synthetic
gcggucgaugcggcccg

SEQ ID NO: 7397 - RNA, 17 nt, Artificial Sequence
  Synthetic
ugcggcccgaggauugc

SEQ ID NO: 7398 - RNA, 17 nt, Artificial Sequence
  Synthetic
cggcaaaagugcgauag

SEQ ID NO: 7399 - RNA, 17 nt, Artificial Sequence
  Synthetic
aaagugcgauagaggcu

SEQ ID NO: 7400 - RNA, 17 nt, Artificial Sequence
  Synthetic
aagugcgauagaggcuc

SEQ ID NO: 7401 - RNA, 17 nt, Artificial Sequence
  Synthetic
gauagaggcucgggccg

SEQ ID NO: 7402 - RNA, 17 nt, Artificial Sequence
  Synthetic
auagaggcucgggccgu

SEQ ID NO: 7403 - RNA, 17 nt, Artificial Sequence
  Synthetic
cgggccgugggcgacca

SEQ ID NO: 7404 - RNA, 17 nt, Artificial Sequence
  Synthetic
ggcgaccaagguuuccc

SEQ ID NO: 7405 - RNA, 17 nt, Artificial Sequence
  Synthetic
uucccaggagacccguc

SEQ ID NO: 7406 - RNA, 17 nt, Artificial Sequence
  Synthetic
ggagacccgucuggucu

SEQ ID NO: 7407 - RNA, 17 nt, Artificial Sequence
  Synthetic
ucuggucucggcgucaa

SEQ ID NO: 7408 - RNA, 17 nt, Artificial Sequence
  Synthetic
cuggucucggcgucaaa

SEQ ID NO: 7409 - RNA, 17 nt, Artificial Sequence
  Synthetic
cgucaaagggcccuccu

SEQ ID NO: 7410 - RNA, 17 nt, Artificial Sequence
  Synthetic
ccuuggcccgccagcac

SEQ ID NO: 7411 - RNA, 17 nt, Artificial Sequence
  Synthetic
cuuggcccgccagcacc

SEQ ID NO: 7412 - RNA, 17 nt, Artificial Sequence
  Synthetic
uuggcccgccagcaccg

SEQ ID NO: 7413 - RNA, 17 nt, Artificial Sequence
  Synthetic
cgccagcaccggggccc

SEQ ID NO: 7414 - RNA, 17 nt, Artificial Sequence
  Synthetic
gccagcaccggggccca

SEQ ID NO: 7415 - RNA, 17 nt, Artificial Sequence
  Synthetic
ccagcaccggggcccag

SEQ ID NO: 7416 - RNA, 17 nt, Artificial Sequence
  Synthetic
ggcccaggggcuauucg

SEQ ID NO: 7417 - RNA, 17 nt, Artificial Sequence
  Synthetic
ccaggggcuauucgcgg

SEQ ID NO: 7418 - RNA, 17 nt, Artificial Sequence
  Synthetic
caggggcuauucgcggc

SEQ ID NO: 7419 - RNA, 17 nt, Artificial Sequence
  Synthetic
cuauucgcggcgggaaa

SEQ ID NO: 7420 - RNA, 17 nt, Artificial Sequence
  Synthetic
aaacggcugccccccaa

SEQ ID NO: 7421 - RNA, 17 nt, Artificial Sequence
  Synthetic
aacggcugccccccaaa

SEQ ID NO: 7422 - RNA, 17 nt, Artificial Sequence
  Synthetic
acggcugccccccaaag

SEQ ID NO: 7423 - RNA, 17 nt, Artificial Sequence
  Synthetic
gcaugaccugugcgcug

SEQ ID NO: 7424 - RNA, 17 nt, Artificial Sequence
  Synthetic
caaagcucucgcugaug

SEQ ID NO: 7425 - RNA, 17 nt, Artificial Sequence
  Synthetic
gucgaccgccgcgcgcu

SEQ ID NO: 7426 - RNA, 17 nt, Artificial Sequence
  Synthetic
cgccgcgcgcucggaga

SEQ ID NO: 7427 - RNA, 17 nt, Artificial Sequence
  Synthetic
gcucggagauggagcgc

SEQ ID NO: 7428 - RNA, 17 nt, Artificial Sequence
  Synthetic
gcgcaggaccaaccgcg

SEQ ID NO: 7429 - RNA, 17 nt, Artificial Sequence
  Synthetic
caggaccaaccgcgugg

SEQ ID NO: 7430 - RNA, 17 nt, Artificial Sequence
  Synthetic
ccgcgugguggcgucga

SEQ ID NO: 7431 - RNA, 17 nt, Artificial Sequence
  Synthetic
gguggcgucgauggugu

SEQ ID NO: 7432 - RNA, 17 nt, Artificial Sequence
  Synthetic
ggcgucgauggugucgg

SEQ ID NO: 7433 - RNA, 17 nt, Artificial Sequence
  Synthetic
gucgauggugucggcgg

SEQ ID NO: 7434 - RNA, 17 nt, Artificial Sequence
  Synthetic
ucgauggugucggcggc

SEQ ID NO: 7435 - RNA, 17 nt, Artificial Sequence
  Synthetic
gcgggcgccuuucgcuc

SEQ ID NO: 7436 - RNA, 17 nt, Artificial Sequence
  Synthetic
cgggcgccuuucgcucc

SEQ ID NO: 7437 - RNA, 17 nt, Artificial Sequence
  Synthetic
gggcgccuuucgcuccg

SEQ ID NO: 7438 - RNA, 17 nt, Artificial Sequence
  Synthetic
gccuuucgcuccggggc

SEQ ID NO: 7439 - RNA, 17 nt, Artificial Sequence
  Synthetic
ccuuucgcuccggggcc

SEQ ID NO: 7440 - RNA, 17 nt, Artificial Sequence
  Synthetic
cuuucgcuccggggccg

SEQ ID NO: 7441 - RNA, 17 nt, Artificial Sequence
  Synthetic
gcuccggggccggggcg

SEQ ID NO: 7442 - RNA, 17 nt, Artificial Sequence
  Synthetic
cuccggggccggggcgc

SEQ ID NO: 7443 - RNA, 17 nt, Artificial Sequence
  Synthetic
uccggggccggggcgcg

SEQ ID NO: 7444 - RNA, 17 nt, Artificial Sequence
  Synthetic
ccggggccggggcgcgg

SEQ ID NO: 7445 - RNA, 17 nt, Artificial Sequence
  Synthetic
cggggcgcggggguccg

SEQ ID NO: 7446 - RNA, 17 nt, Artificial Sequence
  Synthetic
ggggcgcggggguccgc

SEQ ID NO: 7447 - RNA, 17 nt, Artificial Sequence
  Synthetic
gcgcggggguccgcggg

SEQ ID NO: 7448 - RNA, 17 nt, Artificial Sequence
  Synthetic
cgcggggguccgcgggc

SEQ ID NO: 7449 - RNA, 17 nt, Artificial Sequence
  Synthetic
gcggggguccgcgggcg

SEQ ID NO: 7450 - RNA, 17 nt, Artificial Sequence
  Synthetic
cggggguccgcgggcgg

SEQ ID NO: 7451 - RNA, 17 nt, Artificial Sequence
  Synthetic
ggggguccgcgggcggg

SEQ ID NO: 7452 - RNA, 17 nt, Artificial Sequence
  Synthetic
gggguccgcgggcgggg

SEQ ID NO: 7453 - RNA, 17 nt, Artificial Sequence
  Synthetic
aucgccagcgucauuag

SEQ ID NO: 7454 - RNA, 17 nt, Artificial Sequence
  Synthetic
ucgccagcgucauuagc

SEQ ID NO: 7455 - RNA, 17 nt, Artificial Sequence
  Synthetic
cgccagcgucauuagcg

SEQ ID NO: 7456 - RNA, 17 nt, Artificial Sequence
  Synthetic
gccagcgucauuagcgg

SEQ ID NO: 7457 - RNA, 17 nt, Artificial Sequence
  Synthetic
ccagcgucauuagcggg

SEQ ID NO: 7458 - RNA, 17 nt, Artificial Sequence
  Synthetic
cagcgucauuagcgggg

SEQ ID NO: 7459 - RNA, 17 nt, Artificial Sequence
  Synthetic
agcgucauuagcggggg

SEQ ID NO: 7460 - RNA, 17 nt, Artificial Sequence
  Synthetic
uuagcggggggggugcu

SEQ ID NO: 7461 - RNA, 17 nt, Artificial Sequence
  Synthetic
gcacgccccguguccgc

SEQ ID NO: 7462 - RNA, 17 nt, Artificial Sequence
  Synthetic
ccguguccgcuggccuc

SEQ ID NO: 7463 - RNA, 17 nt, Artificial Sequence
  Synthetic
cguguccgcuggccucc

SEQ ID NO: 7464 - RNA, 17 nt, Artificial Sequence
  Synthetic
guccgcuggccuccggg

SEQ ID NO: 7465 - RNA, 17 nt, Artificial Sequence
  Synthetic
uccgcuggccuccgggu

SEQ ID NO: 7466 - RNA, 17 nt, Artificial Sequence
  Synthetic
cuggccuccgggugggu

SEQ ID NO: 7467 - RNA, 17 nt, Artificial Sequence
  Synthetic
uggccuccggguggguc

SEQ ID NO: 7468 - RNA, 17 nt, Artificial Sequence
  Synthetic
cgcgccacgccucgcca

SEQ ID NO: 7469 - RNA, 17 nt, Artificial Sequence
  Synthetic
gcgccacgccucgccau

SEQ ID NO: 7470 - RNA, 17 nt, Artificial Sequence
  Synthetic
cgccacgccucgccaug

SEQ ID NO: 7471 - RNA, 17 nt, Artificial Sequence
  Synthetic
gccacgccucgccaugg

SEQ ID NO: 7472 - RNA, 17 nt, Artificial Sequence
  Synthetic
ccacgccucgccauggg

SEQ ID NO: 7473 - RNA, 17 nt, Artificial Sequence
  Synthetic
cucgccauggggggcgc

SEQ ID NO: 7474 - RNA, 17 nt, Artificial Sequence
  Synthetic
ucgccauggggggcgcc

SEQ ID NO: 7475 - RNA, 17 nt, Artificial Sequence
  Synthetic
cgccauggggggcgccg

SEQ ID NO: 7476 - RNA, 17 nt, Artificial Sequence
  Synthetic
guccguccaccccgccc

SEQ ID NO: 7477 - RNA, 17 nt, Artificial Sequence
  Synthetic
uccguccaccccgcccc

SEQ ID NO: 7478 - RNA, 17 nt, Artificial Sequence
  Synthetic
ccguccaccccgccccg

SEQ ID NO: 7479 - RNA, 17 nt, Artificial Sequence
  Synthetic
uccaccccgccccgggg

SEQ ID NO: 7480 - RNA, 17 nt, Artificial Sequence
  Synthetic
ccaccccgccccggggc

SEQ ID NO: 7481 - RNA, 17 nt, Artificial Sequence
  Synthetic
caccccgccccggggcg

SEQ ID NO: 7482 - RNA, 17 nt, Artificial Sequence
  Synthetic
ccggggcgggguccccc

SEQ ID NO: 7483 - RNA, 17 nt, Artificial Sequence
  Synthetic
cggggcgggguccccca

SEQ ID NO: 7484 - RNA, 17 nt, Artificial Sequence
  Synthetic
ucccccaggguugcgau

SEQ ID NO: 7485 - RNA, 20 nt, Artificial Sequence
  Synthetic
gcgucauuagcggggggggu

SEQ ID NO: 7486 - RNA, 17 nt, Artificial Sequence
  Synthetic
gcgucauuagcgggggg

SEQ ID NO: 7487 - RNA, 20 nt, Artificial Sequence
  Synthetic
ccucuccgacagcgaucugg

SEQ ID NO: 7488 - RNA, 20 nt, Artificial Sequence
  Synthetic
ggacauggaagacccccacg

SEQ ID NO: 7489 - RNA, 20 nt, Artificial Sequence
  Synthetic
ggaagacccccacggagagg

SEQ ID NO: 7490 - RNA, 20 nt, Artificial Sequence
  Synthetic
acgaggacccccccgagccg

SEQ ID NO: 7491 - RNA, 20 nt, Artificial Sequence
  Synthetic
aggacccccccgagccggcg

SEQ ID NO: 7492 - RNA, 20 nt, Artificial Sequence
  Synthetic
cggggaguguuccucgucgg

SEQ ID NO: 7493 - RNA, 20 nt, Artificial Sequence
  Synthetic
auaugcuaauugaccucggc

SEQ ID NO: 7494 - RNA, 20 nt, Artificial Sequence
  Synthetic
uggaccucuccgacagcgau

SEQ ID NO: 7495 - RNA, 20 nt, Artificial Sequence
  Synthetic
ucuccgacagcgaucuggac

SEQ ID NO: 7496 - RNA, 20 nt, Artificial Sequence
  Synthetic
cgaucuggacgaggaccccc

SEQ ID NO: 7497 - RNA, 20 nt, Artificial Sequence
  Synthetic
cggagagccgccgcgacgac

SEQ ID NO: 7498 - RNA, 20 nt, Artificial Sequence
  Synthetic
gccgccgcgacgaccuggaa

SEQ ID NO: 7499 - RNA, 20 nt, Artificial Sequence
  Synthetic
cgaccuggaaucggacagca

SEQ ID NO: 7500 - RNA, 20 nt, Artificial Sequence
  Synthetic
gcagcggggaguguuccucg

SEQ ID NO: 7501 - RNA, 20 nt, Artificial Sequence
  Synthetic
gggaguguuccucgucggac

SEQ ID NO: 7502 - RNA, 20 nt, Artificial Sequence
  Synthetic
guuccucgucggacgaggac

SEQ ID NO: 7503 - RNA, 20 nt, Artificial Sequence
  Synthetic
cgaggacauggaagaccccc

SEQ ID NO: 7504 - RNA, 20 nt, Artificial Sequence
  Synthetic
acauggaagacccccacgga

SEQ ID NO: 7505 - RNA, 20 nt, Artificial Sequence
  Synthetic
acccccacggagaggacgga

SEQ ID NO: 7506 - RNA, 20 nt, Artificial Sequence
  Synthetic
ggcgguccgcccgucucguc

SEQ ID NO: 7507 - RNA, 20 nt, Artificial Sequence
  Synthetic
gcacccagacgccucguccg

SEQ ID NO: 7508 - RNA, 20 nt, Artificial Sequence
  Synthetic
cgccucguccgacggagcgg

SEQ ID NO: 7509 - RNA, 20 nt, Artificial Sequence
  Synthetic
ccacaguguguggucgcgcc

SEQ ID NO: 7510 - RNA, 20 nt, Artificial Sequence
  Synthetic
ccggcgaccgucuugcuccc

SEQ ID NO: 7511 - RNA, 20 nt, Artificial Sequence
  Synthetic
gucuugcucccccgagcagc

SEQ ID NO: 7512 - RNA, 20 nt, Artificial Sequence
  Synthetic
caaagcccagccugcccgcg

SEQ ID NO: 7513 - RNA, 20 nt, Artificial Sequence
  Synthetic
gccugcccgcggcggacgcc

SEQ ID NO: 7514 - RNA, 20 nt, Artificial Sequence
  Synthetic
ggcggacgccgugggcgucg

SEQ ID NO: 7515 - RNA, 20 nt, Artificial Sequence
  Synthetic
cgccgugggcgucgcagggg

SEQ ID NO: 7516 - RNA, 20 nt, Artificial Sequence
  Synthetic
gggucggggucgcggugguc

SEQ ID NO: 7517 - RNA, 20 nt, Artificial Sequence
  Synthetic
ccggggcugccgaugguuug

SEQ ID NO: 7518 - RNA, 20 nt, Artificial Sequence
  Synthetic
gaccaccgcgaccccgaccc

SEQ ID NO: 7519 - RNA, 20 nt, Artificial Sequence
  Synthetic
gcgacgcccacggcguccgc

SEQ ID NO: 7520 - RNA, 20 nt, Artificial Sequence
  Synthetic
ggcgcgaccacacacugugg

SEQ ID NO: 7521 - RNA, 20 nt, Artificial Sequence
  Synthetic
caaaccaucggcagccccgg

SEQ ID NO: 7522 - RNA, 20 nt, Artificial Sequence
  Synthetic
ggaccaccgcgaccccgacc

SEQ ID NO: 7523 - RNA, 20 nt, Artificial Sequence
  Synthetic
accccugcgacgcccacggc

SEQ ID NO: 7524 - RNA, 20 nt, Artificial Sequence
  Synthetic
ccccugcgacgcccacggcg

SEQ ID NO: 7525 - RNA, 20 nt, Artificial Sequence
  Synthetic
cgacgcccacggcguccgcc

SEQ ID NO: 7526 - RNA, 20 nt, Artificial Sequence
  Synthetic
cgcgggcaggcugggcuuug

SEQ ID NO: 7527 - RNA, 20 nt, Artificial Sequence
  Synthetic
gugcugcucgggggagcaag

SEQ ID NO: 7528 - RNA, 20 nt, Artificial Sequence
  Synthetic
gcugcucgggggagcaagac

SEQ ID NO: 7529 - RNA, 20 nt, Artificial Sequence
  Synthetic
gggagcaagacggucgccgg

SEQ ID NO: 7530 - RNA, 20 nt, Artificial Sequence
  Synthetic
ccgcuccgucggacgaggcg

SEQ ID NO: 7531 - RNA, 20 nt, Artificial Sequence
  Synthetic
ucggacgaggcgucugggug

SEQ ID NO: 7532 - RNA, 20 nt, Artificial Sequence
  Synthetic
guccguccucuccguggggg

SEQ ID NO: 7533 - RNA, 20 nt, Artificial Sequence
  Synthetic
uccguccucuccgugggggu

SEQ ID NO: 7534 - RNA, 20 nt, Artificial Sequence
  Synthetic
ccucuccgugggggucuucc

SEQ ID NO: 7535 - RNA, 20 nt, Artificial Sequence
  Synthetic
uccgugggggucuuccaugu

SEQ ID NO: 7536 - RNA, 20 nt, Artificial Sequence
  Synthetic
cgugggggucuuccaugucc

SEQ ID NO: 7537 - RNA, 20 nt, Artificial Sequence
  Synthetic
ugggggucuuccauguccuc

SEQ ID NO: 7538 - RNA, 20 nt, Artificial Sequence
  Synthetic
gggggucuuccauguccucg

SEQ ID NO: 7539 - RNA, 20 nt, Artificial Sequence
  Synthetic
uguccucguccgacgaggaa

SEQ ID NO: 7540 - RNA, 20 nt, Artificial Sequence
  Synthetic
guccucguccgacgaggaac

SEQ ID NO: 7541 - RNA, 20 nt, Artificial Sequence
  Synthetic
guccgacgaggaacacuccc

SEQ ID NO: 7542 - RNA, 20 nt, Artificial Sequence
  Synthetic
ccgacgaggaacacuccccg

SEQ ID NO: 7543 - RNA, 20 nt, Artificial Sequence
  Synthetic
cgaggaacacuccccgcugc

SEQ ID NO: 7544 - RNA, 20 nt, Artificial Sequence
  Synthetic
cgcugcuguccgauuccagg

SEQ ID NO: 7545 - RNA, 20 nt, Artificial Sequence
  Synthetic
gcugcuguccgauuccaggu

SEQ ID NO: 7546 - RNA, 20 nt, Artificial Sequence
  Synthetic
cugcuguccgauuccagguc

SEQ ID NO: 7547 - RNA, 20 nt, Artificial Sequence
  Synthetic
ugcuguccgauuccaggucg

SEQ ID NO: 7548 - RNA, 20 nt, Artificial Sequence
  Synthetic
uuccaggucgucgcggcggc

SEQ ID NO: 7549 - RNA, 20 nt, Artificial Sequence
  Synthetic
ggucgucgcggcggcucucc

SEQ ID NO: 7550 - RNA, 20 nt, Artificial Sequence
  Synthetic
gucgucgcggcggcucuccg

SEQ ID NO: 7551 - RNA, 20 nt, Artificial Sequence
  Synthetic
cgccggcucggggggguccu

SEQ ID NO: 7552 - RNA, 20 nt, Artificial Sequence
  Synthetic
ccggcucggggggguccucg

SEQ ID NO: 7553 - RNA, 20 nt, Artificial Sequence
  Synthetic
cggcucggggggguccucgu

SEQ ID NO: 7554 - RNA, 20 nt, Artificial Sequence
  Synthetic
ggggguccucguccagaucg

SEQ ID NO: 7555 - RNA, 20 nt, Artificial Sequence
  Synthetic
guccagaucgcugucggaga

SEQ ID NO: 7556 - RNA, 20 nt, Artificial Sequence
  Synthetic
ccagaucgcugucggagagg

SEQ ID NO: 7557 - RNA, 20 nt, Artificial Sequence
  Synthetic
aucgcugucggagaggucca

SEQ ID NO: 7558 - RNA, 20 nt, Artificial Sequence
  Synthetic
gccgaggucaauuagcauau

SEQ ID NO: 7559 - RNA, 20 nt, Artificial Sequence
  Synthetic
cuccgugggggucuuccaug

SEQ ID NO: 7560 - RNA, 20 nt, Artificial Sequence
  Synthetic
cguccgacgaggaacacucc

SEQ ID NO: 7561 - RNA, 20 nt, Artificial Sequence
  Synthetic
acgaggaacacuccccgcug

SEQ ID NO: 7562 - RNA, 20 nt, Artificial Sequence
  Synthetic
auuccaggucgucgcggcgg

SEQ ID NO: 7563 - RNA, 20 nt, Artificial Sequence
  Synthetic
gcucggggggguccucgucc

SEQ ID NO: 7564 - RNA, 20 nt, Artificial Sequence
  Synthetic
ggccgaggucaauuagcaua

SEQ ID NO: 7565 - RNA, 20 nt, Artificial Sequence
  Synthetic
aggucaauuagcauaucaau

SEQ ID NO: 7566 - RNA, 17 nt, Artificial Sequence
  Synthetic
gcggggguccgacaaac

SEQ ID NO: 7567 - RNA, 17 nt, Artificial Sequence
  Synthetic
acaaaccaucggcagcc

SEQ ID NO: 7568 - RNA, 17 nt, Artificial Sequence
  Synthetic
ucggcagccccgggacc

SEQ ID NO: 7569 - RNA, 17 nt, Artificial Sequence
  Synthetic
cgggaccaccgcgaccc

SEQ ID NO: 7570 - RNA, 17 nt, Artificial Sequence
  Synthetic
gggaccaccgcgacccc

SEQ ID NO: 7571 - RNA, 17 nt, Artificial Sequence
  Synthetic
ggaccaccgcgaccccg

SEQ ID NO: 7572 - RNA, 17 nt, Artificial Sequence
  Synthetic
ccgcgaccccgaccccu

SEQ ID NO: 7573 - RNA, 17 nt, Artificial Sequence
  Synthetic
cgaccccgaccccugcg

SEQ ID NO: 7574 - RNA, 17 nt, Artificial Sequence
  Synthetic
cgaccccugcgacgccc

SEQ ID NO: 7575 - RNA, 17 nt, Artificial Sequence
  Synthetic
accccugcgacgcccac

SEQ ID NO: 7576 - RNA, 17 nt, Artificial Sequence
  Synthetic
cugcgacgcccacggcg

SEQ ID NO: 7577 - RNA, 17 nt, Artificial Sequence
  Synthetic
ugcgacgcccacggcgu

SEQ ID NO: 7578 - RNA, 17 nt, Artificial Sequence
  Synthetic
gcgacgcccacggcguc

SEQ ID NO: 7579 - RNA, 17 nt, Artificial Sequence
  Synthetic
acggcguccgccgcggg

SEQ ID NO: 7580 - RNA, 17 nt, Artificial Sequence
  Synthetic
ccgcgggcaggcugggc

SEQ ID NO: 7581 - RNA, 17 nt, Artificial Sequence
  Synthetic
cgggcaggcugggcuuu

SEQ ID NO: 7582 - RNA, 17 nt, Artificial Sequence
  Synthetic
ccuugcccccgugcugc

SEQ ID NO: 7583 - RNA, 17 nt, Artificial Sequence
  Synthetic
ccgugcugcucggggga

SEQ ID NO: 7584 - RNA, 17 nt, Artificial Sequence
  Synthetic
cgugcugcucgggggag

SEQ ID NO: 7585 - RNA, 20 nt, Artificial Sequence
  Synthetic
cagaaccaaucgcaacccug

SEQ ID NO: 7586 - RNA, 20 nt, Artificial Sequence
  Synthetic
ccacccggaggccagcggac

SEQ ID NO: 7587 - RNA, 20 nt, Artificial Sequence
  Synthetic
caacccugggggaccccgcc

SEQ ID NO: 7588 - RNA, 20 nt, Artificial Sequence
  Synthetic
cugggggaccccgccccggg

SEQ ID NO: 7589 - RNA, 20 nt, Artificial Sequence
  Synthetic
ggaccccgccccggggcggg

SEQ ID NO: 7590 - RNA, 20 nt, Artificial Sequence
  Synthetic
cccgccccggggcggggugg

SEQ ID NO: 7591 - RNA, 20 nt, Artificial Sequence
  Synthetic
cggccccggcgccccccaug

SEQ ID NO: 7592 - RNA, 20 nt, Artificial Sequence
  Synthetic
uggcgaggcguggcgcggca

SEQ ID NO: 7593 - RNA, 20 nt, Artificial Sequence
  Synthetic
cagugagcagcccgacccac

SEQ ID NO: 7594 - RNA, 20 nt, Artificial Sequence
  Synthetic
cccgacccacccggaggcca

SEQ ID NO: 7595 - RNA, 20 nt, Artificial Sequence
  Synthetic
uggcgauugcccccccgccc

SEQ ID NO: 7596 - RNA, 20 nt, Artificial Sequence
  Synthetic
cggacccccgcgccccggcc

SEQ ID NO: 7597 - RNA, 20 nt, Artificial Sequence
  Synthetic
ccccgcgccccggccccgga

SEQ ID NO: 7598 - RNA, 20 nt, Artificial Sequence
  Synthetic
guugguccugcgcuccaucu

SEQ ID NO: 7599 - RNA, 20 nt, Artificial Sequence
  Synthetic
cgcggcggucgaccgcauca

SEQ ID NO: 7600 - RNA, 20 nt, Artificial Sequence
  Synthetic
cggcggucgaccgcaucagc

SEQ ID NO: 7601 - RNA, 20 nt, Artificial Sequence
  Synthetic
acaggucaugcacgaccccu

SEQ ID NO: 7602 - RNA, 20 nt, Artificial Sequence
  Synthetic
gggggcagccguuucccgcc

SEQ ID NO: 7603 - RNA, 20 nt, Artificial Sequence
  Synthetic
uuucccgccgcgaauagccc

SEQ ID NO: 7604 - RNA, 20 nt, Artificial Sequence
  Synthetic
gccccugggccccggugcug

SEQ ID NO: 7605 - RNA, 20 nt, Artificial Sequence
  Synthetic
ggccccggugcuggcgggcc

SEQ ID NO: 7606 - RNA, 20 nt, Artificial Sequence
  Synthetic
cccggugcuggcgggccaag

SEQ ID NO: 7607 - RNA, 20 nt, Artificial Sequence
  Synthetic
ccaaggagggcccuuugacg

SEQ ID NO: 7608 - RNA, 20 nt, Artificial Sequence
  Synthetic
cccuuugacgccgagaccag

SEQ ID NO: 7609 - RNA, 20 nt, Artificial Sequence
  Synthetic
gccgagaccagacgggucuc

SEQ ID NO: 7610 - RNA, 20 nt, Artificial Sequence
  Synthetic
aaaccuuggucgcccacggc

SEQ ID NO: 7611 - RNA, 20 nt, Artificial Sequence
  Synthetic
cgcacuuuugccggcaaucc

SEQ ID NO: 7612 - RNA, 20 nt, Artificial Sequence
  Synthetic
gcgcgacugcgugcugcgcc

SEQ ID NO: 7613 - RNA, 20 nt, Artificial Sequence
  Synthetic
gcugcgccaagaaaauuuca

SEQ ID NO: 7614 - RNA, 20 nt, Artificial Sequence
  Synthetic
cgaggcgcuggccuccgccg

SEQ ID NO: 7615 - RNA, 20 nt, Artificial Sequence
  Synthetic
acaaccugccgcugcgcccc

SEQ ID NO: 7616 - RNA, 20 nt, Artificial Sequence
  Synthetic
gcgcccccaggaccccauua

SEQ ID NO: 7617 - RNA, 20 nt, Artificial Sequence
  Synthetic
ucgggacgaccgcggcugug

SEQ ID NO: 7618 - RNA, 20 nt, Artificial Sequence
  Synthetic
ggcccuuucuccagugcuac

SEQ ID NO: 7619 - RNA, 20 nt, Artificial Sequence
  Synthetic
cuccagugcuaccugaaggc

SEQ ID NO: 7620 - RNA, 20 nt, Artificial Sequence
  Synthetic
aggcgcgaggccugugcggc

SEQ ID NO: 7621 - RNA, 20 nt, Artificial Sequence
  Synthetic
gcgaggccugugcggccugg

SEQ ID NO: 7622 - RNA, 20 nt, Artificial Sequence
  Synthetic
uguguucgcggcggcgucug

SEQ ID NO: 7623 - RNA, 20 nt, Artificial Sequence
  Synthetic
ggcggcgucuggcggacauu

SEQ ID NO: 7624 - RNA, 20 nt, Artificial Sequence
  Synthetic
ggccaggcucgccaaccgcg

SEQ ID NO: 7625 - RNA, 20 nt, Artificial Sequence
  Synthetic
accgcgucgagcguggcguc

SEQ ID NO: 7626 - RNA, 20 nt, Artificial Sequence
  Synthetic
cgacuacgcgacccuuggug

SEQ ID NO: 7627 - RNA, 20 nt, Artificial Sequence
  Synthetic
cgcgacccuuggugucgggg

SEQ ID NO: 7628 - RNA, 20 nt, Artificial Sequence
  Synthetic
gacccuuggugucggggucg

SEQ ID NO: 7629 - RNA, 20 nt, Artificial Sequence
  Synthetic
cccuuggugucggggucgga

SEQ ID NO: 7630 - RNA, 20 nt, Artificial Sequence
  Synthetic
gaagaugcauuucuaccucc

SEQ ID NO: 7631 - RNA, 20 nt, Artificial Sequence
  Synthetic
accuccccggggccugcaug

SEQ ID NO: 7632 - RNA, 20 nt, Artificial Sequence
  Synthetic
ggccugcauggcgggccuga

SEQ ID NO: 7633 - RNA, 20 nt, Artificial Sequence
  Synthetic
aaauccuagacacgcaccgc

SEQ ID NO: 7634 - RNA, 20 nt, Artificial Sequence
  Synthetic
acacgcaccgccaggagugu

SEQ ID NO: 7635 - RNA, 20 nt, Artificial Sequence
  Synthetic
ggaguguucgagucgugucu

SEQ ID NO: 7636 - RNA, 20 nt, Artificial Sequence
  Synthetic
acacuccuggcggugcgugu

SEQ ID NO: 7637 - RNA, 20 nt, Artificial Sequence
  Synthetic
gggagguagaaaugcaucuu

SEQ ID NO: 7638 - RNA, 20 nt, Artificial Sequence
  Synthetic
acaccaagggucgcguaguc

SEQ ID NO: 7639 - RNA, 20 nt, Artificial Sequence
  Synthetic
ggcggugcgugucuaggauu

SEQ ID NO: 7640 - RNA, 20 nt, Artificial Sequence
  Synthetic
gcggugcgugucuaggauuu

SEQ ID NO: 7641 - RNA, 20 nt, Artificial Sequence
  Synthetic
ucaggcccgccaugcaggcc

SEQ ID NO: 7642 - RNA, 20 nt, Artificial Sequence
  Synthetic
caugcaggccccggggaggu

SEQ ID NO: 7643 - RNA, 20 nt, Artificial Sequence
  Synthetic
ggagguagaaaugcaucuuc

SEQ ID NO: 7644 - RNA, 20 nt, Artificial Sequence
  Synthetic
uccgaccccgacaccaaggg

SEQ ID NO: 7645 - RNA, 20 nt, Artificial Sequence
  Synthetic
cgaccccgacaccaaggguc

SEQ ID NO: 7646 - RNA, 20 nt, Artificial Sequence
  Synthetic
accccgacaccaagggucgc

SEQ ID NO: 7647 - RNA, 20 nt, Artificial Sequence
  Synthetic
ccccgacaccaagggucgcg

SEQ ID NO: 7648 - RNA, 20 nt, Artificial Sequence
  Synthetic
caccaagggucgcguagucg

SEQ ID NO: 7649 - RNA, 20 nt, Artificial Sequence
  Synthetic
cgacgccacgcucgacgcgg

SEQ ID NO: 7650 - RNA, 20 nt, Artificial Sequence
  Synthetic
cgcgguuggcgagccuggcc

SEQ ID NO: 7651 - RNA, 20 nt, Artificial Sequence
  Synthetic
aauguccgccagacgccgcc

SEQ ID NO: 7652 - RNA, 20 nt, Artificial Sequence
  Synthetic
cagacgccgccgcgaacaca

SEQ ID NO: 7653 - RNA, 20 nt, Artificial Sequence
  Synthetic
ccaggccgcacaggccucgc

SEQ ID NO: 7654 - RNA, 20 nt, Artificial Sequence
  Synthetic
gccgcacaggccucgcgccu

SEQ ID NO: 7655 - RNA, 20 nt, Artificial Sequence
  Synthetic
gccuucagguagcacuggag

SEQ ID NO: 7656 - RNA, 20 nt, Artificial Sequence
  Synthetic
guagcacuggagaaagggcc

SEQ ID NO: 7657 - RNA, 20 nt, Artificial Sequence
  Synthetic
cacagccgcggucgucccga

SEQ ID NO: 7658 - RNA, 20 nt, Artificial Sequence
  Synthetic
auaaugggguccugggggcg

SEQ ID NO: 7659 - RNA, 20 nt, Artificial Sequence
  Synthetic
uaaugggguccugggggcgc

SEQ ID NO: 7660 - RNA, 20 nt, Artificial Sequence
  Synthetic
ggggcgcagcggcagguugu

SEQ ID NO: 7661 - RNA, 20 nt, Artificial Sequence
  Synthetic
cggcggaggccagcgccucg

SEQ ID NO: 7662 - RNA, 20 nt, Artificial Sequence
  Synthetic
ugaaauuuucuuggcgcagc

SEQ ID NO: 7663 - RNA, 20 nt, Artificial Sequence
  Synthetic
ggcgcagcacgcagucgcgc

SEQ ID NO: 7664 - RNA, 20 nt, Artificial Sequence
  Synthetic
ggauugccggcaaaagugcg

SEQ ID NO: 7665 - RNA, 20 nt, Artificial Sequence
  Synthetic
gccgugggcgaccaagguuu

SEQ ID NO: 7666 - RNA, 20 nt, Artificial Sequence
  Synthetic
aggagacccgucuggucucg

SEQ ID NO: 7667 - RNA, 20 nt, Artificial Sequence
  Synthetic
ggagacccgucuggucucgg

SEQ ID NO: 7668 - RNA, 20 nt, Artificial Sequence
  Synthetic
gagacccgucuggucucggc

SEQ ID NO: 7669 - RNA, 20 nt, Artificial Sequence
  Synthetic
cuggucucggcgucaaaggg

SEQ ID NO: 7670 - RNA, 20 nt, Artificial Sequence
  Synthetic
cgucaaagggcccuccuugg

SEQ ID NO: 7671 - RNA, 20 nt, Artificial Sequence
  Synthetic
cuuggcccgccagcaccggg

SEQ ID NO: 7672 - RNA, 20 nt, Artificial Sequence
  Synthetic
uggcccgccagcaccggggc

SEQ ID NO: 7673 - RNA, 20 nt, Artificial Sequence
  Synthetic
ggcccgccagcaccggggcc

SEQ ID NO: 7674 - RNA, 20 nt, Artificial Sequence
  Synthetic
cagcaccggggcccaggggc

SEQ ID NO: 7675 - RNA, 20 nt, Artificial Sequence
  Synthetic
ggcgggaaacggcugccccc

SEQ ID NO: 7676 - RNA, 20 nt, Artificial Sequence
  Synthetic
caaaggggucgugcaugacc

SEQ ID NO: 7677 - RNA, 20 nt, Artificial Sequence
  Synthetic
aaaggggucgugcaugaccu

SEQ ID NO: 7678 - RNA, 20 nt, Artificial Sequence
  Synthetic
aaggggucgugcaugaccug

SEQ ID NO: 7679 - RNA, 20 nt, Artificial Sequence
  Synthetic
aggggucgugcaugaccugu

SEQ ID NO: 7680 - RNA, 20 nt, Artificial Sequence
  Synthetic
gcugaugcggucgaccgccg

SEQ ID NO: 7681 - RNA, 20 nt, Artificial Sequence
  Synthetic
ugaugcggucgaccgccgcg

SEQ ID NO: 7682 - RNA, 20 nt, Artificial Sequence
  Synthetic
agauggagcgcaggaccaac

SEQ ID NO: 7683 - RNA, 20 nt, Artificial Sequence
  Synthetic
uccggggccggggcgcgggg

SEQ ID NO: 7684 - RNA, 20 nt, Artificial Sequence
  Synthetic
gggccggggcgcgggggucc

SEQ ID NO: 7685 - RNA, 20 nt, Artificial Sequence
  Synthetic
gggcgggggggcaaucgcca

SEQ ID NO: 7686 - RNA, 20 nt, Artificial Sequence
  Synthetic
uguccgcuggccuccgggug

SEQ ID NO: 7687 - RNA, 20 nt, Artificial Sequence
  Synthetic
guccgcuggccuccgggugg

SEQ ID NO: 7688 - RNA, 20 nt, Artificial Sequence
  Synthetic
uggccuccgggugggucggg

SEQ ID NO: 7689 - RNA, 20 nt, Artificial Sequence
  Synthetic
ggugggucgggcugcucacu

SEQ ID NO: 7690 - RNA, 20 nt, Artificial Sequence
  Synthetic
gugggucgggcugcucacug

SEQ ID NO: 7691 - RNA, 20 nt, Artificial Sequence
  Synthetic
cauggggggcgccggggccg

SEQ ID NO: 7692 - RNA, 20 nt, Artificial Sequence
  Synthetic
ccaccccgccccggggcggg

SEQ ID NO: 7693 - RNA, 20 nt, Artificial Sequence
  Synthetic
cccgccccggggcggggucc

SEQ ID NO: 7694 - RNA, 20 nt, Artificial Sequence
  Synthetic
cccggggcggggucccccag

SEQ ID NO: 7695 - RNA, 20 nt, Artificial Sequence
  Synthetic
gggcggggucccccaggguu

SEQ ID NO: 7696 - RNA, 20 nt, Artificial Sequence
  Synthetic
ggcggggucccccaggguug

SEQ ID NO: 7697 - RNA, 20 nt, Artificial Sequence
  Synthetic
caggguugcgauugguucug

SEQ ID NO: 7698 - RNA, 17 nt, Artificial Sequence
  Synthetic
cccggaggccagcggac

SEQ ID NO: 7699 - RNA, 17 nt, Artificial Sequence
  Synthetic
cccugggggaccccgcc

SEQ ID NO: 7700 - RNA, 17 nt, Artificial Sequence
  Synthetic
ggggaccccgccccggg

SEQ ID NO: 7701 - RNA, 17 nt, Artificial Sequence
  Synthetic
ccccgccccggggcggg

SEQ ID NO: 7702 - RNA, 17 nt, Artificial Sequence
  Synthetic
gccccggggcggggugg

SEQ ID NO: 7703 - RNA, 17 nt, Artificial Sequence
  Synthetic
ccccggcgccccccaug

SEQ ID NO: 7704 - RNA, 17 nt, Artificial Sequence
  Synthetic
cgaggcguggcgcggca

SEQ ID NO: 7705 - RNA, 17 nt, Artificial Sequence
  Synthetic
ugagcagcccgacccac

SEQ ID NO: 7706 - RNA, 17 nt, Artificial Sequence
  Synthetic
gacccacccggaggcca

SEQ ID NO: 7707 - RNA, 17 nt, Artificial Sequence
  Synthetic
cgauugcccccccgccc

SEQ ID NO: 7708 - RNA, 17 nt, Artificial Sequence
  Synthetic
acccccgcgccccggcc

SEQ ID NO: 7709 - RNA, 17 nt, Artificial Sequence
  Synthetic
cgcgccccggccccgga

SEQ ID NO: 7710 - RNA, 17 nt, Artificial Sequence
  Synthetic
gguccugcgcuccaucu

SEQ ID NO: 7711 - RNA, 17 nt, Artificial Sequence
  Synthetic
ggcggucgaccgcauca

SEQ ID NO: 7712 - RNA, 17 nt, Artificial Sequence
  Synthetic
cggucgaccgcaucagc

SEQ ID NO: 7713 - RNA, 17 nt, Artificial Sequence
  Synthetic
ggucaugcacgaccccu

SEQ ID NO: 7714 - RNA, 17 nt, Artificial Sequence
  Synthetic
ggcagccguuucccgcc

SEQ ID NO: 7715 - RNA, 17 nt, Artificial Sequence
  Synthetic
cccgccgcgaauagccc

SEQ ID NO: 7716 - RNA, 17 nt, Artificial Sequence
  Synthetic
ccugggccccggugcug

SEQ ID NO: 7717 - RNA, 17 nt, Artificial Sequence
  Synthetic
cccggugcuggcgggcc

SEQ ID NO: 7718 - RNA, 17 nt, Artificial Sequence
  Synthetic
ggugcuggcgggccaag

SEQ ID NO: 7719 - RNA, 17 nt, Artificial Sequence
  Synthetic
aggagggcccuuugacg

SEQ ID NO: 7720 - RNA, 17 nt, Artificial Sequence
  Synthetic
uuugacgccgagaccag

SEQ ID NO: 7721 - RNA, 17 nt, Artificial Sequence
  Synthetic
gagaccagacgggucuc

SEQ ID NO: 7722 - RNA, 17 nt, Artificial Sequence
  Synthetic
ccuuggucgcccacggc

SEQ ID NO: 7723 - RNA, 17 nt, Artificial Sequence
  Synthetic
acuuuugccggcaaucc

SEQ ID NO: 7724 - RNA, 17 nt, Artificial Sequence
  Synthetic
cgacugcgugcugcgcc

SEQ ID NO: 7725 - RNA, 17 nt, Artificial Sequence
  Synthetic
gcgccaagaaaauuuca

SEQ ID NO: 7726 - RNA, 17 nt, Artificial Sequence
  Synthetic
ggcgcuggccuccgccg

SEQ ID NO: 7727 - RNA, 17 nt, Artificial Sequence
  Synthetic
accugccgcugcgcccc

SEQ ID NO: 7728 - RNA, 17 nt, Artificial Sequence
  Synthetic
cccccaggaccccauua

SEQ ID NO: 7729 - RNA, 17 nt, Artificial Sequence
  Synthetic
ggacgaccgcggcugug

SEQ ID NO: 7730 - RNA, 17 nt, Artificial Sequence
  Synthetic
ccuuucuccagugcuac

SEQ ID NO: 7731 - RNA, 17 nt, Artificial Sequence
  Synthetic
cagugcuaccugaaggc

SEQ ID NO: 7732 - RNA, 17 nt, Artificial Sequence
  Synthetic
cgcgaggccugugcggc

SEQ ID NO: 7733 - RNA, 17 nt, Artificial Sequence
  Synthetic
aggccugugcggccugg

SEQ ID NO: 7734 - RNA, 17 nt, Artificial Sequence
  Synthetic
guucgcggcggcgucug

SEQ ID NO: 7735 - RNA, 17 nt, Artificial Sequence
  Synthetic
ggcgucuggcggacauu

SEQ ID NO: 7736 - RNA, 17 nt, Artificial Sequence
  Synthetic
caggcucgccaaccgcg

SEQ ID NO: 7737 - RNA, 17 nt, Artificial Sequence
  Synthetic
gcgucgagcguggcguc

SEQ ID NO: 7738 - RNA, 17 nt, Artificial Sequence
  Synthetic
cuacgcgacccuuggug

SEQ ID NO: 7739 - RNA, 17 nt, Artificial Sequence
  Synthetic
gacccuuggugucgggg

SEQ ID NO: 7740 - RNA, 17 nt, Artificial Sequence
  Synthetic
ccuuggugucggggucg

SEQ ID NO: 7741 - RNA, 17 nt, Artificial Sequence
  Synthetic
uuggugucggggucgga

SEQ ID NO: 7742 - RNA, 17 nt, Artificial Sequence
  Synthetic
gaugcauuucuaccucc

SEQ ID NO: 7743 - RNA, 17 nt, Artificial Sequence
  Synthetic
uccccggggccugcaug

SEQ ID NO: 7744 - RNA, 17 nt, Artificial Sequence
  Synthetic
cugcauggcgggccuga

SEQ ID NO: 7745 - RNA, 17 nt, Artificial Sequence
  Synthetic
uccuagacacgcaccgc

SEQ ID NO: 7746 - RNA, 17 nt, Artificial Sequence
  Synthetic
cgcaccgccaggagugu

SEQ ID NO: 7747 - RNA, 17 nt, Artificial Sequence
  Synthetic
guguucgagucgugucu

SEQ ID NO: 7748 - RNA, 17 nt, Artificial Sequence
  Synthetic
acacuccuggcggugcg

SEQ ID NO: 7749 - RNA, 17 nt, Artificial Sequence
  Synthetic
gggagguagaaaugcau

SEQ ID NO: 7750 - RNA, 17 nt, Artificial Sequence
  Synthetic
acaccaagggucgcgua

SEQ ID NO: 7751 - RNA, 17 nt, Artificial Sequence
  Synthetic
agacacgacucgaacac

SEQ ID NO: 7752 - RNA, 17 nt, Artificial Sequence
  Synthetic
ggcggugcgugucuagg

SEQ ID NO: 7753 - RNA, 17 nt, Artificial Sequence
  Synthetic
gcggugcgugucuagga

SEQ ID NO: 7754 - RNA, 17 nt, Artificial Sequence
  Synthetic
ucaggcccgccaugcag

SEQ ID NO: 7755 - RNA, 17 nt, Artificial Sequence
  Synthetic
caugcaggccccgggga

SEQ ID NO: 7756 - RNA, 17 nt, Artificial Sequence
  Synthetic
ggagguagaaaugcauc

SEQ ID NO: 7757 - RNA, 17 nt, Artificial Sequence
  Synthetic
cgaccccgacaccaagg

SEQ ID NO: 7758 - RNA, 17 nt, Artificial Sequence
  Synthetic
accccgacaccaagggu

SEQ ID NO: 7759 - RNA, 17 nt, Artificial Sequence
  Synthetic
ccccgacaccaaggguc

SEQ ID NO: 7760 - RNA, 17 nt, Artificial Sequence
  Synthetic
caccaagggucgcguag

SEQ ID NO: 7761 - RNA, 17 nt, Artificial Sequence
  Synthetic
gacgccacgcucgacgc

SEQ ID NO: 7762 - RNA, 17 nt, Artificial Sequence
  Synthetic
cgcgguuggcgagccug

SEQ ID NO: 7763 - RNA, 17 nt, Artificial Sequence
  Synthetic
aauguccgccagacgcc

SEQ ID NO: 7764 - RNA, 17 nt, Artificial Sequence
  Synthetic
cagacgccgccgcgaac

SEQ ID NO: 7765 - RNA, 17 nt, Artificial Sequence
  Synthetic
ccaggccgcacaggccu

SEQ ID NO: 7766 - RNA, 17 nt, Artificial Sequence
  Synthetic
gccgcacaggccucgcg

SEQ ID NO: 7767 - RNA, 17 nt, Artificial Sequence
  Synthetic
gccuucagguagcacug

SEQ ID NO: 7768 - RNA, 17 nt, Artificial Sequence
  Synthetic
guagcacuggagaaagg

SEQ ID NO: 7769 - RNA, 17 nt, Artificial Sequence
  Synthetic
cacagccgcggucgucc

SEQ ID NO: 7770 - RNA, 17 nt, Artificial Sequence
  Synthetic
auaaugggguccugggg

SEQ ID NO: 7771 - RNA, 17 nt, Artificial Sequence
  Synthetic
uaaugggguccuggggg

SEQ ID NO: 7772 - RNA, 17 nt, Artificial Sequence
  Synthetic
ggggcgcagcggcaggu

SEQ ID NO: 7773 - RNA, 17 nt, Artificial Sequence
  Synthetic
cggcggaggccagcgcc

SEQ ID NO: 7774 - RNA, 17 nt, Artificial Sequence
  Synthetic
ugaaauuuucuuggcgc

SEQ ID NO: 7775 - RNA, 17 nt, Artificial Sequence
  Synthetic
ggcgcagcacgcagucg

SEQ ID NO: 7776 - RNA, 17 nt, Artificial Sequence
  Synthetic
ggauugccggcaaaagu

SEQ ID NO: 7777 - RNA, 17 nt, Artificial Sequence
  Synthetic
gccgugggcgaccaagg

SEQ ID NO: 7778 - RNA, 17 nt, Artificial Sequence
  Synthetic
aggagacccgucugguc

SEQ ID NO: 7779 - RNA, 17 nt, Artificial Sequence
  Synthetic
gagacccgucuggucuc

SEQ ID NO: 7780 - RNA, 17 nt, Artificial Sequence
  Synthetic
uggcccgccagcaccgg

SEQ ID NO: 7781 - RNA, 17 nt, Artificial Sequence
  Synthetic
ggcccgccagcaccggg

SEQ ID NO: 7782 - RNA, 17 nt, Artificial Sequence
  Synthetic
cagcaccggggcccagg

SEQ ID NO: 7783 - RNA, 17 nt, Artificial Sequence
  Synthetic
gggcuauucgcggcggg

SEQ ID NO: 7784 - RNA, 17 nt, Artificial Sequence
  Synthetic
ggcgggaaacggcugcc

SEQ ID NO: 7785 - RNA, 17 nt, Artificial Sequence
  Synthetic
caaaggggucgugcaug

SEQ ID NO: 7786 - RNA, 17 nt, Artificial Sequence
  Synthetic
aaaggggucgugcauga

SEQ ID NO: 7787 - RNA, 17 nt, Artificial Sequence
  Synthetic
aaggggucgugcaugac

SEQ ID NO: 7788 - RNA, 17 nt, Artificial Sequence
  Synthetic
aggggucgugcaugacc

SEQ ID NO: 7789 - RNA, 17 nt, Artificial Sequence
  Synthetic
gcugaugcggucgaccg

SEQ ID NO: 7790 - RNA, 17 nt, Artificial Sequence
  Synthetic
ugaugcggucgaccgcc

SEQ ID NO: 7791 - RNA, 17 nt, Artificial Sequence
  Synthetic
agauggagcgcaggacc

SEQ ID NO: 7792 - RNA, 17 nt, Artificial Sequence
  Synthetic
gggccggggcgcggggg

SEQ ID NO: 7793 - RNA, 17 nt, Artificial Sequence
  Synthetic
ggccggggcgcgggggu

SEQ ID NO: 7794 - RNA, 17 nt, Artificial Sequence
  Synthetic
gggcgggggggcaaucg

SEQ ID NO: 7795 - RNA, 17 nt, Artificial Sequence
  Synthetic
uguccgcuggccuccgg

SEQ ID NO: 7796 - RNA, 17 nt, Artificial Sequence
  Synthetic
ggugggucgggcugcuc

SEQ ID NO: 7797 - RNA, 17 nt, Artificial Sequence
  Synthetic
gugggucgggcugcuca

SEQ ID NO: 7798 - RNA, 17 nt, Artificial Sequence
  Synthetic
ugccgcgccacgccucg

SEQ ID NO: 7799 - RNA, 17 nt, Artificial Sequence
  Synthetic
cauggggggcgccgggg

SEQ ID NO: 7800 - RNA, 17 nt, Artificial Sequence
  Synthetic
ccccggggcgggguccc

SEQ ID NO: 7801 - RNA, 17 nt, Artificial Sequence
  Synthetic
cccggggcggggucccc

SEQ ID NO: 7802 - RNA, 17 nt, Artificial Sequence
  Synthetic
gggcggggucccccagg

SEQ ID NO: 7803 - RNA, 17 nt, Artificial Sequence
  Synthetic
ggcggggucccccaggg

SEQ ID NO: 7804 - RNA, 17 nt, Artificial Sequence
  Synthetic
caggguugcgauugguu

SEQ ID NO: 7805 - RNA, 17 nt, Artificial Sequence
  Synthetic
aggguugcgauugguuc

SEQ ID NO: 7806 - RNA, 17 nt, Artificial Sequence
  Synthetic
ggguugcgauugguucu

SEQ ID NO: 7807 - RNA, 17 nt, Artificial Sequence
  Synthetic
gguugcgauugguucug

SEQ ID NO: 7808 - RNA, 17 nt, Artificial Sequence
  Synthetic
gcgagcgagcuguugga

SEQ ID NO: 7809 - RNA, 17 nt, Artificial Sequence
  Synthetic
gcucgcucgcaacgucc

SEQ ID NO: 7810 - RNA, 20 nt, Artificial Sequence
  Synthetic
gucgcgguugggagcggcca

SEQ ID NO: 7811 - RNA, 20 nt, Artificial Sequence
  Synthetic
guugcgagcgagcuguugga

SEQ ID NO: 7812 - RNA, 20 nt, Artificial Sequence
  Synthetic
ggacguugcgagcgagcugu

SEQ ID NO: 7813 - RNA, 17 nt, Artificial Sequence
  Synthetic
aucuccacgcgacccca

SEQ ID NO: 7814 - RNA, 17 nt, Artificial Sequence
  Synthetic
cguugcgagcgagcugu

SEQ ID NO: 7815 - RNA, 20 nt, Artificial Sequence
  Synthetic
ccgaucuccacgcgacccca

SEQ ID NO: 7816 - RNA, 20 nt, Artificial Sequence
  Synthetic
acagcucgcucgcaacgucc

SEQ ID NO: 7817 - RNA, 20 nt, Artificial Sequence
  Synthetic
cgcgguugggagcggccaug

SEQ ID NO: 7818 - RNA, 20 nt, Artificial Sequence
  Synthetic
ucgcgguugggagcggccau

SEQ ID NO: 7819 - RNA, 17 nt, Artificial Sequence
  Synthetic
gcgguugggagcggcca

SEQ ID NO: 7820 - RNA, 17 nt, Artificial Sequence
  Synthetic
gcggccauggggucgcg

SEQ ID NO: 7821 - RNA, 17 nt, Artificial Sequence
  Synthetic
gguugggagcggccaug

SEQ ID NO: 7822 - RNA, 20 nt, Artificial Sequence
  Synthetic
ggagcggccauggggucgcg

SEQ ID NO: 7823 - RNA, 17 nt, Artificial Sequence
  Synthetic
cgguugggagcggccau

SEQ ID NO: 7824 - RNA, 17 nt, Artificial Sequence
  Synthetic
uggggucgcguggagau

SEQ ID NO: 7825 - RNA, 20 nt, Artificial Sequence
  Synthetic
ccauggggucgcguggagau

SEQ ID NO: 7826 - RNA, 17 nt, Artificial Sequence
  Synthetic
cuaccccaaggaagggc

SEQ ID NO: 7827 - RNA, 17 nt, Artificial Sequence
  Synthetic
uaccccaaggaagggcg

SEQ ID NO: 7828 - RNA, 17 nt, Artificial Sequence
  Synthetic
acuaccccaaggaaggg

SEQ ID NO: 7829 - RNA, 17 nt, Artificial Sequence
  Synthetic
cccaaggaagggcgggg

SEQ ID NO: 7830 - RNA, 17 nt, Artificial Sequence
  Synthetic
cgccccgcccuuccuug

SEQ ID NO: 7831 - RNA, 17 nt, Artificial Sequence
  Synthetic
accgccccgcccuuccu

SEQ ID NO: 7832 - RNA, 17 nt, Artificial Sequence
  Synthetic
ccgccccgcccuuccuu

SEQ ID NO: 7833 - RNA, 20 nt, Artificial Sequence
  Synthetic
cacuaccccaaggaagggcg

SEQ ID NO: 7834 - RNA, 20 nt, Artificial Sequence
  Synthetic
uaccccaaggaagggcgggg

SEQ ID NO: 7835 - RNA, 20 nt, Artificial Sequence
  Synthetic
aaccgccccgcccuuccuug

SEQ ID NO: 7836 - RNA, 20 nt, Artificial Sequence
  Synthetic
uaaaccgccccgcccuuccu

SEQ ID NO: 7837 - RNA, 20 nt, Artificial Sequence
  Synthetic
aaaccgccccgcccuuccuu

SEQ ID NO: 7838 - RNA, 22 nt, Artificial Sequence
  Synthetic
gcuccagaaagcgcacgagcga

SEQ ID NO: 7839 - RNA, 24 nt, Artificial Sequence
  Synthetic
gagcuccagaaagcgcacgagcga

SEQ ID NO: 7840 - RNA, 23 nt, Artificial Sequence
  Synthetic
guaauuguguguggguugcucga

SEQ ID NO: 7841 - RNA, 19 nt, Artificial Sequence
  Synthetic
gcggcauaccgguaucccg

SEQ ID NO: 7842 - RNA, 22 nt, Artificial Sequence
  Synthetic
gccgcggcauaccgguaucccg

SEQ ID NO: 7843 - RNA, 23 nt, Artificial Sequence
  Synthetic
ggccgcggcauaccgguaucccg

SEQ ID NO: 7844 - RNA, 18 nt, Artificial Sequence
  Synthetic
gacguugcgagcgagcug

SEQ ID NO: 7845 - RNA, 19 nt, Artificial Sequence
  Synthetic
ggacguugcgagcgagcug

SEQ ID NO: 7846 - RNA, 23 nt, Artificial Sequence
  Synthetic
gccuggacguugcgagcgagcug

SEQ ID NO: 7847 - RNA, 24 nt, Artificial Sequence
  Synthetic
ggccuggacguugcgagcgagcug

SEQ ID NO: 7848 - RNA, 19 nt, Artificial Sequence
  Synthetic
gccgcggccauggugccga

SEQ ID NO: 7849 - RNA, 23 nt, Artificial Sequence
  Synthetic
guaugccgcggccauggugccga

SEQ ID NO: 7850 - RNA, 24 nt, Artificial Sequence
  Synthetic
gguaugccgcggccauggugccga

SEQ ID NO: 7851 - RNA, 23 nt, Artificial Sequence
  Synthetic
gucgcucgugcgcuuucuggagc

SEQ ID NO: 7852 - RNA, 19 nt, Artificial Sequence
  Synthetic
gucgaguucgacgcccugc

SEQ ID NO: 7853 - RNA, 22 nt, Artificial Sequence
  Synthetic
gacgucgaguucgacgcccugc

SEQ ID NO: 7854 - RNA, 19 nt, Artificial Sequence
  Synthetic
gcucccaaccgcgacccuc

SEQ ID NO: 7855 - RNA, 22 nt, Artificial Sequence
  Synthetic
gccgcucccaaccgcgacccuc

SEQ ID NO: 7856 - RNA, 23 nt, Artificial Sequence
  Synthetic
ggccgcucccaaccgcgacccuc

SEQ ID NO: 7857 - RNA, 19 nt, Artificial Sequence
  Synthetic
gcaaacagccuguacgacg

SEQ ID NO: 7858 - RNA, 22 nt, Artificial Sequence
  Synthetic
gaugcaaacagccuguacgacg

SEQ ID NO: 7859 - RNA, 18 nt, Artificial Sequence
  Synthetic
cagaaagcgcacgagcga

SEQ ID NO: 7860 - RNA, 19 nt, Artificial Sequence
  Synthetic
ccagaaagcgcacgagcga

SEQ ID NO: 7861 - RNA, 21 nt, Artificial Sequence
  Synthetic
cuccagaaagcgcacgagcga

SEQ ID NO: 7862 - RNA, 23 nt, Artificial Sequence
  Synthetic
agcuccagaaagcgcacgagcga

SEQ ID NO: 7863 - RNA, 18 nt, Artificial Sequence
  Synthetic
uguguguggguugcucga

SEQ ID NO: 7864 - RNA, 19 nt, Artificial Sequence
  Synthetic
uuguguguggguugcucga

SEQ ID NO: 7865 - RNA, 21 nt, Artificial Sequence
  Synthetic
aauuguguguggguugcucga

SEQ ID NO: 7866 - RNA, 22 nt, Artificial Sequence
  Synthetic
uaauuguguguggguugcucga

SEQ ID NO: 7867 - RNA, 24 nt, Artificial Sequence
  Synthetic
uguaauuguguguggguugcucga

SEQ ID NO: 7868 - RNA, 18 nt, Artificial Sequence
  Synthetic
cggcauaccgguaucccg

SEQ ID NO: 7869 - RNA, 21 nt, Artificial Sequence
  Synthetic
ccgcggcauaccgguaucccg

SEQ ID NO: 7870 - RNA, 24 nt, Artificial Sequence
  Synthetic
uggccgcggcauaccgguaucccg

SEQ ID NO: 7871 - RNA, 20 nt, Artificial Sequence
  Synthetic
uggacguugcgagcgagcug

SEQ ID NO: 7872 - RNA, 21 nt, Artificial Sequence
  Synthetic
cuggacguugcgagcgagcug

SEQ ID NO: 7873 - RNA, 22 nt, Artificial Sequence
  Synthetic
ccuggacguugcgagcgagcug

SEQ ID NO: 7874 - RNA, 18 nt, Artificial Sequence
  Synthetic
uuggucauguaauugugu

SEQ ID NO: 7875 - RNA, 19 nt, Artificial Sequence
  Synthetic
cuuggucauguaauugugu

SEQ ID NO: 7876 - RNA, 21 nt, Artificial Sequence
  Synthetic
aucuuggucauguaauugugu

SEQ ID NO: 7877 - RNA, 22 nt, Artificial Sequence
  Synthetic
aaucuuggucauguaauugugu

SEQ ID NO: 7878 - RNA, 23 nt, Artificial Sequence
  Synthetic
uaaucuuggucauguaauugugu

SEQ ID NO: 7879 - RNA, 24 nt, Artificial Sequence
  Synthetic
auaaucuuggucauguaauugugu

SEQ ID NO: 7880 - RNA, 18 nt, Artificial Sequence
  Synthetic
ccgcggccauggugccga

SEQ ID NO: 7881 - RNA, 21 nt, Artificial Sequence
  Synthetic
augccgcggccauggugccga

SEQ ID NO: 7882 - RNA, 22 nt, Artificial Sequence
  Synthetic
uaugccgcggccauggugccga

SEQ ID NO: 7883 - RNA, 18 nt, Artificial Sequence
  Synthetic
ucgugcgcuuucuggagc

SEQ ID NO: 7884 - RNA, 19 nt, Artificial Sequence
  Synthetic
cucgugcgcuuucuggagc

SEQ ID NO: 7885 - RNA, 21 nt, Artificial Sequence
  Synthetic
cgcucgugcgcuuucuggagc

SEQ ID NO: 7886 - RNA, 22 nt, Artificial Sequence
  Synthetic
ucgcucgugcgcuuucuggagc

SEQ ID NO: 7887 - RNA, 24 nt, Artificial Sequence
  Synthetic
ugucgcucgugcgcuuucuggagc

SEQ ID NO: 7888 - RNA, 18 nt, Artificial Sequence
  Synthetic
ucgaguucgacgcccugc

SEQ ID NO: 7889 - RNA, 21 nt, Artificial Sequence
  Synthetic
acgucgaguucgacgcccugc

SEQ ID NO: 7890 - RNA, 23 nt, Artificial Sequence
  Synthetic
cgacgucgaguucgacgcccugc

SEQ ID NO: 7891 - RNA, 24 nt, Artificial Sequence
  Synthetic
acgacgucgaguucgacgcccugc

SEQ ID NO: 7892 - RNA, 18 nt, Artificial Sequence
  Synthetic
cucccaaccgcgacccuc

SEQ ID NO: 7893 - RNA, 21 nt, Artificial Sequence
  Synthetic
ccgcucccaaccgcgacccuc

SEQ ID NO: 7894 - RNA, 24 nt, Artificial Sequence
  Synthetic
uggccgcucccaaccgcgacccuc

SEQ ID NO: 7895 - RNA, 18 nt, Artificial Sequence
  Synthetic
caaacagccuguacgacg

SEQ ID NO: 7896 - RNA, 21 nt, Artificial Sequence
  Synthetic
augcaaacagccuguacgacg

SEQ ID NO: 7897 - RNA, 23 nt, Artificial Sequence
  Synthetic
cgaugcaaacagccuguacgacg

SEQ ID NO: 7898 - RNA, 24 nt, Artificial Sequence
  Synthetic
ccgaugcaaacagccuguacgacg

SEQ ID NO: 7899 - RNA, 21 nt, Artificial Sequence
  Synthetic
acgggggaggcccuggacggg

SEQ ID NO: 7900 - RNA, 22 nt, Artificial Sequence
  Synthetic
cacgggggaggcccuggacggg

SEQ ID NO: 7901 - RNA, 23 nt, Artificial Sequence
  Synthetic
ucacgggggaggcccuggacggg

SEQ ID NO: 7902 - RNA, 24 nt, Artificial Sequence
  Synthetic
cucacgggggaggcccuggacggg

SEQ ID NO: 7903 - RNA, 18 nt, Artificial Sequence
  Synthetic
cgcgguugggagcggcca

SEQ ID NO: 7904 - RNA, 19 nt, Artificial Sequence
  Synthetic
ucgcgguugggagcggcca

SEQ ID NO: 7905 - RNA, 21 nt, Artificial Sequence
  Synthetic
ggucgcgguugggagcggcca

SEQ ID NO: 7906 - RNA, 22 nt, Artificial Sequence
  Synthetic
gggucgcgguugggagcggcca

SEQ ID NO: 7907 - RNA, 23 nt, Artificial Sequence
  Synthetic
agggucgcgguugggagcggcca

SEQ ID NO: 7908 - RNA, 24 nt, Artificial Sequence
  Synthetic
gagggucgcgguugggagcggcca

SEQ ID NO: 7909 - RNA, 18 nt, Artificial Sequence
  Synthetic
ggggaggcccuggacggg

SEQ ID NO: 7910 - RNA, 19 nt, Artificial Sequence
  Synthetic
gggggaggcccuggacggg

SEQ ID NO: 7911 - RNA, 18 nt, Artificial Sequence
  Synthetic
ucguacaggcuguuugca

SEQ ID NO: 7912 - RNA, 19 nt, Artificial Sequence
  Synthetic
gucguacaggcuguuugca

SEQ ID NO: 7913 - RNA, 21 nt, Artificial Sequence
  Synthetic
acgucguacaggcuguuugca

SEQ ID NO: 7914 - RNA, 22 nt, Artificial Sequence
  Synthetic
gacgucguacaggcuguuugca

SEQ ID NO: 7915 - RNA, 23 nt, Artificial Sequence
  Synthetic
cgacgucguacaggcuguuugca

SEQ ID NO: 7916 - RNA, 24 nt, Artificial Sequence
  Synthetic
ucgacgucguacaggcuguuugca

SEQ ID NO: 7917 - RNA, 18 nt, Artificial Sequence
  Synthetic
acggccuggacguugcga

SEQ ID NO: 7918 - RNA, 19 nt, Artificial Sequence
  Synthetic
gacggccuggacguugcga

SEQ ID NO: 7919 - RNA, 20 nt, Artificial Sequence
  Synthetic
ggacggccuggacguugcga

SEQ ID NO: 7920 - RNA, 21 nt, Artificial Sequence
  Synthetic
aggacggccuggacguugcga

SEQ ID NO: 7921 - RNA, 22 nt, Artificial Sequence
  Synthetic
gaggacggccuggacguugcga

SEQ ID NO: 7922 - RNA, 23 nt, Artificial Sequence
  Synthetic
cgaggacggccuggacguugcga

SEQ ID NO: 7923 - RNA, 24 nt, Artificial Sequence
  Synthetic
ccgaggacggccuggacguugcga

SEQ ID NO: 7924 - RNA, 18 nt, Artificial Sequence
  Synthetic
gccaccucgaucgugcua

SEQ ID NO: 7925 - RNA, 19 nt, Artificial Sequence
  Synthetic
cgccaccucgaucgugcua

SEQ ID NO: 7926 - RNA, 21 nt, Artificial Sequence
  Synthetic
gacgccaccucgaucgugcua

SEQ ID NO: 7927 - RNA, 22 nt, Artificial Sequence
  Synthetic
cgacgccaccucgaucgugcua

SEQ ID NO: 7928 - RNA, 23 nt, Artificial Sequence
  Synthetic
gcgacgccaccucgaucgugcua

SEQ ID NO: 7929 - RNA, 24 nt, Artificial Sequence
  Synthetic
ugcgacgccaccucgaucgugcua

SEQ ID NO: 7930 - RNA, 18 nt, Artificial Sequence
  Synthetic
acgcacgccaccgacaac

SEQ ID NO: 7931 - RNA, 19 nt, Artificial Sequence
  Synthetic
cacgcacgccaccgacaac

SEQ ID NO: 7932 - RNA, 21 nt, Artificial Sequence
  Synthetic
cacacgcacgccaccgacaac

SEQ ID NO: 7933 - RNA, 22 nt, Artificial Sequence
  Synthetic
acacacgcacgccaccgacaac

SEQ ID NO: 7934 - RNA, 23 nt, Artificial Sequence
  Synthetic
uacacacgcacgccaccgacaac

SEQ ID NO: 7935 - RNA, 24 nt, Artificial Sequence
  Synthetic
guacacacgcacgccaccgacaac

SEQ ID NO: 7936 - RNA, 18 nt, Artificial Sequence
  Synthetic
guuugcaucggagcgcac

SEQ ID NO: 7937 - RNA, 19 nt, Artificial Sequence
  Synthetic
uguuugcaucggagcgcac

SEQ ID NO: 7938 - RNA, 21 nt, Artificial Sequence
  Synthetic
gcuguuugcaucggagcgcac

SEQ ID NO: 7939 - RNA, 22 nt, Artificial Sequence
  Synthetic
ggcuguuugcaucggagcgcac

SEQ ID NO: 7940 - RNA, 23 nt, Artificial Sequence
  Synthetic
aggcuguuugcaucggagcgcac

SEQ ID NO: 7941 - RNA, 24 nt, Artificial Sequence
  Synthetic
caggcuguuugcaucggagcgcac

SEQ ID NO: 7942 - RNA, 18 nt, Artificial Sequence
  Synthetic
aucagcggcugguggacc

SEQ ID NO: 7943 - RNA, 19 nt, Artificial Sequence
  Synthetic
aaucagcggcugguggacc

SEQ ID NO: 7944 - RNA, 21 nt, Artificial Sequence
  Synthetic
gcaaucagcggcugguggacc

SEQ ID NO: 7945 - RNA, 22 nt, Artificial Sequence
  Synthetic
ggcaaucagcggcugguggacc

SEQ ID NO: 7946 - RNA, 23 nt, Artificial Sequence
  Synthetic
gggcaaucagcggcugguggacc

SEQ ID NO: 7947 - RNA, 24 nt, Artificial Sequence
  Synthetic
cgggcaaucagcggcugguggacc

SEQ ID NO: 7948 - RNA, 18 nt, Artificial Sequence
  Synthetic
ccguccagggccuccccc

SEQ ID NO: 7949 - RNA, 19 nt, Artificial Sequence
  Synthetic
cccguccagggccuccccc

SEQ ID NO: 7950 - RNA, 21 nt, Artificial Sequence
  Synthetic
gucccguccagggccuccccc

SEQ ID NO: 7951 - RNA, 22 nt, Artificial Sequence
  Synthetic
cgucccguccagggccuccccc

SEQ ID NO: 7952 - RNA, 23 nt, Artificial Sequence
  Synthetic
ccgucccguccagggccuccccc

SEQ ID NO: 7953 - RNA, 24 nt, Artificial Sequence
  Synthetic
cccgucccguccagggccuccccc

SEQ ID NO: 7954 - RNA, 18 nt, Artificial Sequence
  Synthetic
ucgcgguugggagcggcc

SEQ ID NO: 7955 - RNA, 19 nt, Artificial Sequence
  Synthetic
gucgcgguugggagcggcc

SEQ ID NO: 7956 - RNA, 20 nt, Artificial Sequence
  Synthetic
ggucgcgguugggagcggcc

SEQ ID NO: 7957 - RNA, 21 nt, Artificial Sequence
  Synthetic
gggucgcgguugggagcggcc

SEQ ID NO: 7958 - RNA, 22 nt, Artificial Sequence
  Synthetic
agggucgcgguugggagcggcc

SEQ ID NO: 7959 - RNA, 23 nt, Artificial Sequence
  Synthetic
gagggucgcgguugggagcggcc

SEQ ID NO: 7960 - RNA, 24 nt, Artificial Sequence
  Synthetic
ggagggucgcgguugggagcggcc

SEQ ID NO: 7961 - RNA, 18 nt, Artificial Sequence
  Synthetic
cgcggcauaccgguaucc

SEQ ID NO: 7962 - RNA, 19 nt, Artificial Sequence
  Synthetic
ccgcggcauaccgguaucc

SEQ ID NO: 7963 - RNA, 21 nt, Artificial Sequence
  Synthetic
ggccgcggcauaccgguaucc

SEQ ID NO: 7964 - RNA, 22 nt, Artificial Sequence
  Synthetic
uggccgcggcauaccgguaucc

SEQ ID NO: 7965 - RNA, 23 nt, Artificial Sequence
  Synthetic
auggccgcggcauaccgguaucc

SEQ ID NO: 7966 - RNA, 24 nt, Artificial Sequence
  Synthetic
cauggccgcggcauaccgguaucc

SEQ ID NO: 7967 - RNA, 18 nt, Artificial Sequence
  Synthetic
uugcaucggagcgcacgc

SEQ ID NO: 7968 - RNA, 19 nt, Artificial Sequence
  Synthetic
uuugcaucggagcgcacgc

SEQ ID NO: 7969 - RNA, 21 nt, Artificial Sequence
  Synthetic
uguuugcaucggagcgcacgc

SEQ ID NO: 7970 - RNA, 22 nt, Artificial Sequence
  Synthetic
cuguuugcaucggagcgcacgc

SEQ ID NO: 7971 - RNA, 23 nt, Artificial Sequence
  Synthetic
gcuguuugcaucggagcgcacgc

SEQ ID NO: 7972 - RNA, 24 nt, Artificial Sequence
  Synthetic
ggcuguuugcaucggagcgcacgc

SEQ ID NO: 7973 - RNA, 18 nt, Artificial Sequence
  Synthetic
ccgagcuccagaaagcgc

SEQ ID NO: 7974 - RNA, 19 nt, Artificial Sequence
  Synthetic
cccgagcuccagaaagcgc

SEQ ID NO: 7975 - RNA, 21 nt, Artificial Sequence
  Synthetic
aacccgagcuccagaaagcgc

SEQ ID NO: 7976 - RNA, 22 nt, Artificial Sequence
  Synthetic
caacccgagcuccagaaagcgc

SEQ ID NO: 7977 - RNA, 23 nt, Artificial Sequence
  Synthetic
acaacccgagcuccagaaagcgc

SEQ ID NO: 7978 - RNA, 24 nt, Artificial Sequence
  Synthetic
gacaacccgagcuccagaaagcgc

SEQ ID NO: 7979 - RNA, 18 nt, Artificial Sequence
  Synthetic
gagcggccauggggucgc

SEQ ID NO: 7980 - RNA, 19 nt, Artificial Sequence
  Synthetic
ggagcggccauggggucgc

SEQ ID NO: 7981 - RNA, 20 nt, Artificial Sequence
  Synthetic
gggagcggccauggggucgc

SEQ ID NO: 7982 - RNA, 21 nt, Artificial Sequence
  Synthetic
ugggagcggccauggggucgc

SEQ ID NO: 7983 - RNA, 22 nt, Artificial Sequence
  Synthetic
uugggagcggccauggggucgc

SEQ ID NO: 7984 - RNA, 23 nt, Artificial Sequence
  Synthetic
guugggagcggccauggggucgc

SEQ ID NO: 7985 - RNA, 24 nt, Artificial Sequence
  Synthetic
gguugggagcggccauggggucgc

SEQ ID NO: 7986 - RNA, 18 nt, Artificial Sequence
  Synthetic
aaacgccccgaggacggc

SEQ ID NO: 7987 - RNA, 19 nt, Artificial Sequence
  Synthetic
caaacgccccgaggacggc

SEQ ID NO: 7988 - RNA, 18 nt, Artificial Sequence
  Synthetic
ccgcggcauaccgguauc

SEQ ID NO: 7989 - RNA, 19 nt, Artificial Sequence
  Synthetic
gccgcggcauaccgguauc

SEQ ID NO: 7990 - RNA, 21 nt, Artificial Sequence
  Synthetic
uggccgcggcauaccgguauc

SEQ ID NO: 7991 - RNA, 22 nt, Artificial Sequence
  Synthetic
auggccgcggcauaccgguauc

SEQ ID NO: 7992 - RNA, 23 nt, Artificial Sequence
  Synthetic
cauggccgcggcauaccgguauc

SEQ ID NO: 7993 - RNA, 24 nt, Artificial Sequence
  Synthetic
ccauggccgcggcauaccgguauc

SEQ ID NO: 7994 - RNA, 18 nt, Artificial Sequence
  Synthetic
guucauguaggccagcuc

SEQ ID NO: 7995 - RNA, 19 nt, Artificial Sequence
  Synthetic
cguucauguaggccagcuc

SEQ ID NO: 7996 - RNA, 21 nt, Artificial Sequence
  Synthetic
cucguucauguaggccagcuc

SEQ ID NO: 7997 - RNA, 22 nt, Artificial Sequence
  Synthetic
ccucguucauguaggccagcuc

SEQ ID NO: 7998 - RNA, 23 nt, Artificial Sequence
  Synthetic
cccucguucauguaggccagcuc

SEQ ID NO: 7999 - RNA, 24 nt, Artificial Sequence
  Synthetic
ccccucguucauguaggccagcuc

SEQ ID NO: 8000 - RNA, 18 nt, Artificial Sequence
  Synthetic
caccgacaacccgagcuc

SEQ ID NO: 8001 - RNA, 19 nt, Artificial Sequence
  Synthetic
ccaccgacaacccgagcuc

SEQ ID NO: 8002 - RNA, 21 nt, Artificial Sequence
  Synthetic
cgccaccgacaacccgagcuc

SEQ ID NO: 8003 - RNA, 22 nt, Artificial Sequence
  Synthetic
acgccaccgacaacccgagcuc

SEQ ID NO: 8004 - RNA, 23 nt, Artificial Sequence
  Synthetic
cacgccaccgacaacccgagcuc

SEQ ID NO: 8005 - RNA, 24 nt, Artificial Sequence
  Synthetic
gcacgccaccgacaacccgagcuc

SEQ ID NO: 8006 - RNA, 18 nt, Artificial Sequence
  Synthetic
gccgauacccgucccguc

SEQ ID NO: 8007 - RNA, 19 nt, Artificial Sequence
  Synthetic
cgccgauacccgucccguc

SEQ ID NO: 8008 - RNA, 21 nt, Artificial Sequence
  Synthetic
cgcgccgauacccgucccguc

SEQ ID NO: 8009 - RNA, 22 nt, Artificial Sequence
  Synthetic
gcgcgccgauacccgucccguc

SEQ ID NO: 8010 - RNA, 23 nt, Artificial Sequence
  Synthetic
ugcgcgccgauacccgucccguc

SEQ ID NO: 8011 - RNA, 24 nt, Artificial Sequence
  Synthetic
augcgcgccgauacccgucccguc

SEQ ID NO: 8012 - RNA, 18 nt, Artificial Sequence
  Synthetic
gauggggugcgggccguc

SEQ ID NO: 8013 - RNA, 19 nt, Artificial Sequence
  Synthetic
cgauggggugcgggccguc

SEQ ID NO: 8014 - RNA, 21 nt, Artificial Sequence
  Synthetic
cucgauggggugcgggccguc

SEQ ID NO: 8015 - RNA, 22 nt, Artificial Sequence
  Synthetic
gcucgauggggugcgggccguc

SEQ ID NO: 8016 - RNA, 23 nt, Artificial Sequence
  Synthetic
ugcucgauggggugcgggccguc

SEQ ID NO: 8017 - RNA, 24 nt, Artificial Sequence
  Synthetic
uugcucgauggggugcgggccguc

SEQ ID NO: 8018 - RNA, 18 nt, Artificial Sequence
  Synthetic
caccucgaucgugcuaag

SEQ ID NO: 8019 - RNA, 19 nt, Artificial Sequence
  Synthetic
ccaccucgaucgugcuaag

SEQ ID NO: 8020 - RNA, 21 nt, Artificial Sequence
  Synthetic
cgccaccucgaucgugcuaag

SEQ ID NO: 8021 - RNA, 22 nt, Artificial Sequence
  Synthetic
acgccaccucgaucgugcuaag

SEQ ID NO: 8022 - RNA, 23 nt, Artificial Sequence
  Synthetic
gacgccaccucgaucgugcuaag

SEQ ID NO: 8023 - RNA, 24 nt, Artificial Sequence
  Synthetic
cgacgccaccucgaucgugcuaag

SEQ ID NO: 8024 - RNA, 18 nt, Artificial Sequence
  Synthetic
guugcaauacgaccccag

SEQ ID NO: 8025 - RNA, 19 nt, Artificial Sequence
  Synthetic
uguugcaauacgaccccag

SEQ ID NO: 8026 - RNA, 21 nt, Artificial Sequence
  Synthetic
gguguugcaauacgaccccag

SEQ ID NO: 8027 - RNA, 22 nt, Artificial Sequence
  Synthetic
ggguguugcaauacgaccccag

SEQ ID NO: 8028 - RNA, 23 nt, Artificial Sequence
  Synthetic
aggguguugcaauacgaccccag

SEQ ID NO: 8029 - RNA, 24 nt, Artificial Sequence
  Synthetic
caggguguugcaauacgaccccag

SEQ ID NO: 8030 - RNA, 18 nt, Artificial Sequence
  Synthetic
cagggccucccccgugag

SEQ ID NO: 8031 - RNA, 19 nt, Artificial Sequence
  Synthetic
ccagggccucccccgugag

SEQ ID NO: 8032 - RNA, 21 nt, Artificial Sequence
  Synthetic
guccagggccucccccgugag

SEQ ID NO: 8033 - RNA, 22 nt, Artificial Sequence
  Synthetic
cguccagggccucccccgugag

SEQ ID NO: 8034 - RNA, 23 nt, Artificial Sequence
  Synthetic
ccguccagggccucccccgugag

SEQ ID NO: 8035 - RNA, 24 nt, Artificial Sequence
  Synthetic
cccguccagggccucccccgugag

SEQ ID NO: 8036 - RNA, 18 nt, Artificial Sequence
  Synthetic
uuugcaucggagcgcacg

SEQ ID NO: 8037 - RNA, 19 nt, Artificial Sequence
  Synthetic
guuugcaucggagcgcacg

SEQ ID NO: 8038 - RNA, 21 nt, Artificial Sequence
  Synthetic
cuguuugcaucggagcgcacg

SEQ ID NO: 8039 - RNA, 22 nt, Artificial Sequence
  Synthetic
gcuguuugcaucggagcgcacg

SEQ ID NO: 8040 - RNA, 23 nt, Artificial Sequence
  Synthetic
ggcuguuugcaucggagcgcacg

SEQ ID NO: 8041 - RNA, 24 nt, Artificial Sequence
  Synthetic
aggcuguuugcaucggagcgcacg

SEQ ID NO: 8042 - RNA, 18 nt, Artificial Sequence
  Synthetic
agcggccauggggucgcg

SEQ ID NO: 8043 - RNA, 19 nt, Artificial Sequence
  Synthetic
gagcggccauggggucgcg

SEQ ID NO: 8044 - RNA, 21 nt, Artificial Sequence
  Synthetic
gggagcggccauggggucgcg

SEQ ID NO: 8045 - RNA, 22 nt, Artificial Sequence
  Synthetic
ugggagcggccauggggucgcg

SEQ ID NO: 8046 - RNA, 23 nt, Artificial Sequence
  Synthetic
uugggagcggccauggggucgcg

SEQ ID NO: 8047 - RNA, 24 nt, Artificial Sequence
  Synthetic
guugggagcggccauggggucgcg

SEQ ID NO: 8048 - RNA, 18 nt, Artificial Sequence
  Synthetic
uacgaccccagcagggcg

SEQ ID NO: 8049 - RNA, 19 nt, Artificial Sequence
  Synthetic
auacgaccccagcagggcg

SEQ ID NO: 8050 - RNA, 21 nt, Artificial Sequence
  Synthetic
caauacgaccccagcagggcg

SEQ ID NO: 8051 - RNA, 22 nt, Artificial Sequence
  Synthetic
gcaauacgaccccagcagggcg

SEQ ID NO: 8052 - RNA, 23 nt, Artificial Sequence
  Synthetic
ugcaauacgaccccagcagggcg

SEQ ID NO: 8053 - RNA, 24 nt, Artificial Sequence
  Synthetic
uugcaauacgaccccagcagggcg

SEQ ID NO: 8054 - RNA, 18 nt, Artificial Sequence
  Synthetic
uuguguguggguugcucg

SEQ ID NO: 8055 - RNA, 19 nt, Artificial Sequence
  Synthetic
auuguguguggguugcucg

SEQ ID NO: 8056 - RNA, 21 nt, Artificial Sequence
  Synthetic
uaauuguguguggguugcucg

SEQ ID NO: 8057 - RNA, 22 nt, Artificial Sequence
  Synthetic
guaauuguguguggguugcucg

SEQ ID NO: 8058 - RNA, 23 nt, Artificial Sequence
  Synthetic
uguaauuguguguggguugcucg

SEQ ID NO: 8059 - RNA, 24 nt, Artificial Sequence
  Synthetic
auguaauuguguguggguugcucg

SEQ ID NO: 8060 - RNA, 18 nt, Artificial Sequence
  Synthetic
accucgaucgugcuaagg

SEQ ID NO: 8061 - RNA, 19 nt, Artificial Sequence
  Synthetic
caccucgaucgugcuaagg

SEQ ID NO: 8062 - RNA, 21 nt, Artificial Sequence
  Synthetic
gccaccucgaucgugcuaagg

SEQ ID NO: 8063 - RNA, 22 nt, Artificial Sequence
  Synthetic
cgccaccucgaucgugcuaagg

SEQ ID NO: 8064 - RNA, 23 nt, Artificial Sequence
  Synthetic
acgccaccucgaucgugcuaagg

SEQ ID NO: 8065 - RNA, 24 nt, Artificial Sequence
  Synthetic
gacgccaccucgaucgugcuaagg

SEQ ID NO: 8066 - RNA, 18 nt, Artificial Sequence
  Synthetic
auggccucgguggccagg

SEQ ID NO: 8067 - RNA, 19 nt, Artificial Sequence
  Synthetic
gauggccucgguggccagg

SEQ ID NO: 8068 - RNA, 21 nt, Artificial Sequence
  Synthetic
gcgauggccucgguggccagg

SEQ ID NO: 8069 - RNA, 22 nt, Artificial Sequence
  Synthetic
ggcgauggccucgguggccagg

SEQ ID NO: 8070 - RNA, 23 nt, Artificial Sequence
  Synthetic
gggcgauggccucgguggccagg

SEQ ID NO: 8071 - RNA, 24 nt, Artificial Sequence
  Synthetic
agggcgauggccucgguggccagg

SEQ ID NO: 8072 - RNA, 18 nt, Artificial Sequence
  Synthetic
uaucccggagggucgcgg

SEQ ID NO: 8073 - RNA, 19 nt, Artificial Sequence
  Synthetic
guaucccggagggucgcgg

SEQ ID NO: 8074 - RNA, 21 nt, Artificial Sequence
  Synthetic
cgguaucccggagggucgcgg

SEQ ID NO: 8075 - RNA, 22 nt, Artificial Sequence
  Synthetic
ccgguaucccggagggucgcgg

SEQ ID NO: 8076 - RNA, 23 nt, Artificial Sequence
  Synthetic
accgguaucccggagggucgcgg

SEQ ID NO: 8077 - RNA, 24 nt, Artificial Sequence
  Synthetic
uaccgguaucccggagggucgcgg

SEQ ID NO: 8078 - RNA, 18 nt, Artificial Sequence
  Synthetic
gcgggcaaucagcggcug

SEQ ID NO: 8079 - RNA, 19 nt, Artificial Sequence
  Synthetic
cgcgggcaaucagcggcug

SEQ ID NO: 8080 - RNA, 21 nt, Artificial Sequence
  Synthetic
gucgcgggcaaucagcggcug

SEQ ID NO: 8081 - RNA, 22 nt, Artificial Sequence
  Synthetic
cgucgcgggcaaucagcggcug

SEQ ID NO: 8082 - RNA, 23 nt, Artificial Sequence
  Synthetic
ccgucgcgggcaaucagcggcug

SEQ ID NO: 8083 - RNA, 24 nt, Artificial Sequence
  Synthetic
gccgucgcgggcaaucagcggcug

SEQ ID NO: 8084 - RNA, 18 nt, Artificial Sequence
  Synthetic
cguacaggcuguuugcau

SEQ ID NO: 8085 - RNA, 19 nt, Artificial Sequence
  Synthetic
ucguacaggcuguuugcau

SEQ ID NO: 8086 - RNA, 21 nt, Artificial Sequence
  Synthetic
cgucguacaggcuguuugcau

SEQ ID NO: 8087 - RNA, 22 nt, Artificial Sequence
  Synthetic
acgucguacaggcuguuugcau

SEQ ID NO: 8088 - RNA, 23 nt, Artificial Sequence
  Synthetic
gacgucguacaggcuguuugcau

SEQ ID NO: 8089 - RNA, 24 nt, Artificial Sequence
  Synthetic
cgacgucguacaggcuguuugcau

SEQ ID NO: 8090 - RNA, 18 nt, Artificial Sequence
  Synthetic
cguucauguaggccagcu

SEQ ID NO: 8091 - RNA, 19 nt, Artificial Sequence
  Synthetic
ucguucauguaggccagcu

SEQ ID NO: 8092 - RNA, 21 nt, Artificial Sequence
  Synthetic
ccucguucauguaggccagcu

SEQ ID NO: 8093 - RNA, 22 nt, Artificial Sequence
  Synthetic
cccucguucauguaggccagcu

SEQ ID NO: 8094 - RNA, 23 nt, Artificial Sequence
  Synthetic
ccccucguucauguaggccagcu

SEQ ID NO: 8095 - RNA, 24 nt, Artificial Sequence
  Synthetic
gccccucguucauguaggccagcu

SEQ ID NO: 8096 - RNA, 18 nt, Artificial Sequence
  Synthetic
cgccaccucgaucgugcu

SEQ ID NO: 8097 - RNA, 19 nt, Artificial Sequence
  Synthetic
acgccaccucgaucgugcu

SEQ ID NO: 8098 - RNA, 21 nt, Artificial Sequence
  Synthetic
cgacgccaccucgaucgugcu

SEQ ID NO: 8099 - RNA, 22 nt, Artificial Sequence
  Synthetic
gcgacgccaccucgaucgugcu

SEQ ID NO: 8100 - RNA, 23 nt, Artificial Sequence
  Synthetic
ugcgacgccaccucgaucgugcu

SEQ ID NO: 8101 - RNA, 24 nt, Artificial Sequence
  Synthetic
augcgacgccaccucgaucgugcu

SEQ ID NO: 8102 - RNA, 18 nt, Artificial Sequence
  Synthetic
aucccggagggucgcggu

SEQ ID NO: 8103 - RNA, 19 nt, Artificial Sequence
  Synthetic
uaucccggagggucgcggu

SEQ ID NO: 8104 - RNA, 21 nt, Artificial Sequence
  Synthetic
gguaucccggagggucgcggu

SEQ ID NO: 8105 - RNA, 22 nt, Artificial Sequence
  Synthetic
cgguaucccggagggucgcggu

SEQ ID NO: 8106 - RNA, 23 nt, Artificial Sequence
  Synthetic
ccgguaucccggagggucgcggu

SEQ ID NO: 8107 - RNA, 24 nt, Artificial Sequence
  Synthetic
accgguaucccggagggucgcggu

SEQ ID NO: 8108 - RNA, 18 nt, Artificial Sequence
  Synthetic
uggguugcucgauggggu

SEQ ID NO: 8109 - RNA, 19 nt, Artificial Sequence
  Synthetic
guggguugcucgauggggu

SEQ ID NO: 8110 - RNA, 21 nt, Artificial Sequence
  Synthetic
guguggguugcucgauggggu

SEQ ID NO: 8111 - RNA, 22 nt, Artificial Sequence
  Synthetic
uguguggguugcucgauggggu

SEQ ID NO: 8112 - RNA, 23 nt, Artificial Sequence
  Synthetic
guguguggguugcucgauggggu

SEQ ID NO: 8113 - RNA, 24 nt, Artificial Sequence
  Synthetic
uguguguggguugcucgauggggu

SEQ ID NO: 8114 - RNA, 18 nt, Artificial Sequence
  Synthetic
gaggacggccuggacguu

SEQ ID NO: 8115 - RNA, 19 nt, Artificial Sequence
  Synthetic
cgaggacggccuggacguu

SEQ ID NO: 8116 - RNA, 20 nt, Artificial Sequence
  Synthetic
ccgaggacggccuggacguu

SEQ ID NO: 8117 - RNA, 21 nt, Artificial Sequence
  Synthetic
cccgaggacggccuggacguu

SEQ ID NO: 8118 - RNA, 22 nt, Artificial Sequence
  Synthetic
ccccgaggacggccuggacguu

SEQ ID NO: 8119 - RNA, 23 nt, Artificial Sequence
  Synthetic
gccccgaggacggccuggacguu

SEQ ID NO: 8120 - RNA, 24 nt, Artificial Sequence
  Synthetic
cgccccgaggacggccuggacguu

SEQ ID NO: 8121 - RNA, 18 nt, Artificial Sequence
  Synthetic
caggcugaaggcggcguu

SEQ ID NO: 8122 - RNA, 19 nt, Artificial Sequence
  Synthetic
ccaggcugaaggcggcguu

SEQ ID NO: 8123 - RNA, 21 nt, Artificial Sequence
  Synthetic
ggccaggcugaaggcggcguu

SEQ ID NO: 8124 - RNA, 22 nt, Artificial Sequence
  Synthetic
uggccaggcugaaggcggcguu

SEQ ID NO: 8125 - RNA, 23 nt, Artificial Sequence
  Synthetic
guggccaggcugaaggcggcguu

SEQ ID NO: 8126 - RNA, 24 nt, Artificial Sequence
  Synthetic
gguggccaggcugaaggcggcguu

SEQ ID NO: 8127 - RNA, 18 nt, Artificial Sequence
  Synthetic
ucccggagggucgcgguu

SEQ ID NO: 8128 - RNA, 19 nt, Artificial Sequence
  Synthetic
aucccggagggucgcgguu

SEQ ID NO: 8129 - RNA, 21 nt, Artificial Sequence
  Synthetic
guaucccggagggucgcgguu

SEQ ID NO: 8130 - RNA, 22 nt, Artificial Sequence
  Synthetic
gguaucccggagggucgcgguu

SEQ ID NO: 8131 - RNA, 23 nt, Artificial Sequence
  Synthetic
cgguaucccggagggucgcgguu

SEQ ID NO: 8132 - RNA, 24 nt, Artificial Sequence
  Synthetic
ccgguaucccggagggucgcgguu

SEQ ID NO: 8133 - RNA, 18 nt, Artificial Sequence
  Synthetic
gcgacggcccgcacccca

SEQ ID NO: 8134 - RNA, 19 nt, Artificial Sequence
  Synthetic
cgcgacggcccgcacccca

SEQ ID NO: 8135 - RNA, 21 nt, Artificial Sequence
  Synthetic
cccgcgacggcccgcacccca

SEQ ID NO: 8136 - RNA, 22 nt, Artificial Sequence
  Synthetic
gcccgcgacggcccgcacccca

SEQ ID NO: 8137 - RNA, 23 nt, Artificial Sequence
  Synthetic
ugcccgcgacggcccgcacccca

SEQ ID NO: 8138 - RNA, 24 nt, Artificial Sequence
  Synthetic
uugcccgcgacggcccgcacccca

SEQ ID NO: 8139 - RNA, 18 nt, Artificial Sequence
  Synthetic
ccgccuucagccuggcca

SEQ ID NO: 8140 - RNA, 19 nt, Artificial Sequence
  Synthetic
gccgccuucagccuggcca

SEQ ID NO: 8141 - RNA, 21 nt, Artificial Sequence
  Synthetic
acgccgccuucagccuggcca

SEQ ID NO: 8142 - RNA, 22 nt, Artificial Sequence
  Synthetic
aacgccgccuucagccuggcca

SEQ ID NO: 8143 - RNA, 23 nt, Artificial Sequence
  Synthetic
gaacgccgccuucagccuggcca

SEQ ID NO: 8144 - RNA, 24 nt, Artificial Sequence
  Synthetic
ugaacgccgccuucagccuggcca

SEQ ID NO: 8145 - RNA, 18 nt, Artificial Sequence
  Synthetic
aggccaucgcccugcuca

SEQ ID NO: 8146 - RNA, 19 nt, Artificial Sequence
  Synthetic
gaggccaucgcccugcuca

SEQ ID NO: 8147 - RNA, 21 nt, Artificial Sequence
  Synthetic
ccgaggccaucgcccugcuca

SEQ ID NO: 8148 - RNA, 22 nt, Artificial Sequence
  Synthetic
accgaggccaucgcccugcuca

SEQ ID NO: 8149 - RNA, 23 nt, Artificial Sequence
  Synthetic
caccgaggccaucgcccugcuca

SEQ ID NO: 8150 - RNA, 24 nt, Artificial Sequence
  Synthetic
ccaccgaggccaucgcccugcuca

SEQ ID NO: 8151 - RNA, 18 nt, Artificial Sequence
  Synthetic
ggucccuccuuagcacga

SEQ ID NO: 8152 - RNA, 19 nt, Artificial Sequence
  Synthetic
gggucccuccuuagcacga

SEQ ID NO: 8153 - RNA, 21 nt, Artificial Sequence
  Synthetic
ccgggucccuccuuagcacga

SEQ ID NO: 8154 - RNA, 22 nt, Artificial Sequence
  Synthetic
accgggucccuccuuagcacga

SEQ ID NO: 8155 - RNA, 23 nt, Artificial Sequence
  Synthetic
gaccgggucccuccuuagcacga

SEQ ID NO: 8156 - RNA, 24 nt, Artificial Sequence
  Synthetic
cgaccgggucccuccuuagcacga

SEQ ID NO: 8157 - RNA, 18 nt, Artificial Sequence
  Synthetic
cacgggggaggcccugga

SEQ ID NO: 8158 - RNA, 19 nt, Artificial Sequence
  Synthetic
ucacgggggaggcccugga

SEQ ID NO: 8159 - RNA, 21 nt, Artificial Sequence
  Synthetic
gcucacgggggaggcccugga

SEQ ID NO: 8160 - RNA, 22 nt, Artificial Sequence
  Synthetic
ugcucacgggggaggcccugga

SEQ ID NO: 8161 - RNA, 23 nt, Artificial Sequence
  Synthetic
cugcucacgggggaggcccugga

SEQ ID NO: 8162 - RNA, 24 nt, Artificial Sequence
  Synthetic
ccugcucacgggggaggcccugga

SEQ ID NO: 8163 - RNA, 18 nt, Artificial Sequence
  Synthetic
cggagcuggccuacauga

SEQ ID NO: 8164 - RNA, 19 nt, Artificial Sequence
  Synthetic
ccggagcuggccuacauga

SEQ ID NO: 8165 - RNA, 21 nt, Artificial Sequence
  Synthetic
uuccggagcuggccuacauga

SEQ ID NO: 8166 - RNA, 22 nt, Artificial Sequence
  Synthetic
uuuccggagcuggccuacauga

SEQ ID NO: 8167 - RNA, 23 nt, Artificial Sequence
  Synthetic
guuuccggagcuggccuacauga

SEQ ID NO: 8168 - RNA, 24 nt, Artificial Sequence
  Synthetic
aguuuccggagcuggccuacauga

SEQ ID NO: 8169 - RNA, 18 nt, Artificial Sequence
  Synthetic
gagcuggccuacaugaac

SEQ ID NO: 8170 - RNA, 19 nt, Artificial Sequence
  Synthetic
ggagcuggccuacaugaac

SEQ ID NO: 8171 - RNA, 21 nt, Artificial Sequence
  Synthetic
ccggagcuggccuacaugaac

SEQ ID NO: 8172 - RNA, 22 nt, Artificial Sequence
  Synthetic
uccggagcuggccuacaugaac

SEQ ID NO: 8173 - RNA, 23 nt, Artificial Sequence
  Synthetic
uuccggagcuggccuacaugaac

SEQ ID NO: 8174 - RNA, 24 nt, Artificial Sequence
  Synthetic
uuuccggagcuggccuacaugaac

SEQ ID NO: 8175 - RNA, 18 nt, Artificial Sequence
  Synthetic
ggccaucgcccugcucac

SEQ ID NO: 8176 - RNA, 19 nt, Artificial Sequence
  Synthetic
aggccaucgcccugcucac

SEQ ID NO: 8177 - RNA, 21 nt, Artificial Sequence
  Synthetic
cgaggccaucgcccugcucac

SEQ ID NO: 8178 - RNA, 22 nt, Artificial Sequence
  Synthetic
ccgaggccaucgcccugcucac

SEQ ID NO: 8179 - RNA, 23 nt, Artificial Sequence
  Synthetic
accgaggccaucgcccugcucac

SEQ ID NO: 8180 - RNA, 24 nt, Artificial Sequence
  Synthetic
caccgaggccaucgcccugcucac

SEQ ID NO: 8181 - RNA, 18 nt, Artificial Sequence
  Synthetic
uuuccggagcuggccuac

SEQ ID NO: 8182 - RNA, 19 nt, Artificial Sequence
  Synthetic
guuuccggagcuggccuac

SEQ ID NO: 8183 - RNA, 21 nt, Artificial Sequence
  Synthetic
aaguuuccggagcuggccuac

SEQ ID NO: 8184 - RNA, 22 nt, Artificial Sequence
  Synthetic
caaguuuccggagcuggccuac

SEQ ID NO: 8185 - RNA, 23 nt, Artificial Sequence
  Synthetic
ccaaguuuccggagcuggccuac

SEQ ID NO: 8186 - RNA, 24 nt, Artificial Sequence
  Synthetic
accaaguuuccggagcuggccuac

SEQ ID NO: 8187 - RNA, 18 nt, Artificial Sequence
  Synthetic
cugcucacgggggaggcc

SEQ ID NO: 8188 - RNA, 19 nt, Artificial Sequence
  Synthetic
ccugcucacgggggaggcc

SEQ ID NO: 8189 - RNA, 21 nt, Artificial Sequence
  Synthetic
gcccugcucacgggggaggcc

SEQ ID NO: 8190 - RNA, 22 nt, Artificial Sequence
  Synthetic
cgcccugcucacgggggaggcc

SEQ ID NO: 8191 - RNA, 23 nt, Artificial Sequence
  Synthetic
ucgcccugcucacgggggaggcc

SEQ ID NO: 8192 - RNA, 24 nt, Artificial Sequence
  Synthetic
aucgcccugcucacgggggaggcc

SEQ ID NO: 8193 - RNA, 18 nt, Artificial Sequence
  Synthetic
auuaucgaccgccgggcc

SEQ ID NO: 8194 - RNA, 19 nt, Artificial Sequence
  Synthetic
gauuaucgaccgccgggcc

SEQ ID NO: 8195 - RNA, 21 nt, Artificial Sequence
  Synthetic
aagauuaucgaccgccgggcc

SEQ ID NO: 8196 - RNA, 22 nt, Artificial Sequence
  Synthetic
caagauuaucgaccgccgggcc

SEQ ID NO: 8197 - RNA, 23 nt, Artificial Sequence
  Synthetic
ccaagauuaucgaccgccgggcc

SEQ ID NO: 8198 - RNA, 24 nt, Artificial Sequence
  Synthetic
accaagauuaucgaccgccgggcc

SEQ ID NO: 8199 - RNA, 18 nt, Artificial Sequence
  Synthetic
gcaacguccaggccgucc

SEQ ID NO: 8200 - RNA, 19 nt, Artificial Sequence
  Synthetic
cgcaacguccaggccgucc

SEQ ID NO: 8201 - RNA, 20 nt, Artificial Sequence
  Synthetic
ucgcaacguccaggccgucc

SEQ ID NO: 8202 - RNA, 21 nt, Artificial Sequence
  Synthetic
cucgcaacguccaggccgucc

SEQ ID NO: 8203 - RNA, 22 nt, Artificial Sequence
  Synthetic
gcucgcaacguccaggccgucc

SEQ ID NO: 8204 - RNA, 23 nt, Artificial Sequence
  Synthetic
cgcucgcaacguccaggccgucc

SEQ ID NO: 8205 - RNA, 24 nt, Artificial Sequence
  Synthetic
ucgcucgcaacguccaggccgucc

SEQ ID NO: 8206 - RNA, 18 nt, Artificial Sequence
  Synthetic
gaggccaucgcccugcuc

SEQ ID NO: 8207 - RNA, 19 nt, Artificial Sequence
  Synthetic
cgaggccaucgcccugcuc

SEQ ID NO: 8208 - RNA, 21 nt, Artificial Sequence
  Synthetic
accgaggccaucgcccugcuc

SEQ ID NO: 8209 - RNA, 22 nt, Artificial Sequence
  Synthetic
caccgaggccaucgcccugcuc

SEQ ID NO: 8210 - RNA, 23 nt, Artificial Sequence
  Synthetic
ccaccgaggccaucgcccugcuc

SEQ ID NO: 8211 - RNA, 24 nt, Artificial Sequence
  Synthetic
gccaccgaggccaucgcccugcuc

SEQ ID NO: 8212 - RNA, 18 nt, Artificial Sequence
  Synthetic
ugucgcucgugcgcuuuc

SEQ ID NO: 8213 - RNA, 19 nt, Artificial Sequence
  Synthetic
cugucgcucgugcgcuuuc

SEQ ID NO: 8214 - RNA, 21 nt, Artificial Sequence
  Synthetic
cccugucgcucgugcgcuuuc

SEQ ID NO: 8215 - RNA, 22 nt, Artificial Sequence
  Synthetic
acccugucgcucgugcgcuuuc

SEQ ID NO: 8216 - RNA, 23 nt, Artificial Sequence
  Synthetic
cacccugucgcucgugcgcuuuc

SEQ ID NO: 8217 - RNA, 24 nt, Artificial Sequence
  Synthetic
acacccugucgcucgugcgcuuuc

SEQ ID NO: 8218 - RNA, 18 nt, Artificial Sequence
  Synthetic
gcguguguaccaaguuuc

SEQ ID NO: 8219 - RNA, 19 nt, Artificial Sequence
  Synthetic
ugcguguguaccaaguuuc

SEQ ID NO: 8220 - RNA, 21 nt, Artificial Sequence
  Synthetic
cgugcguguguaccaaguuuc

SEQ ID NO: 8221 - RNA, 22 nt, Artificial Sequence
  Synthetic
gcgugcguguguaccaaguuuc

SEQ ID NO: 8222 - RNA, 23 nt, Artificial Sequence
  Synthetic
ggcgugcguguguaccaaguuuc

SEQ ID NO: 8223 - RNA, 24 nt, Artificial Sequence
  Synthetic
uggcgugcguguguaccaaguuuc

SEQ ID NO: 8224 - RNA, 18 nt, Artificial Sequence
  Synthetic
agcuggccuacaugaacg

SEQ ID NO: 8225 - RNA, 19 nt, Artificial Sequence
  Synthetic
gagcuggccuacaugaacg

SEQ ID NO: 8226 - RNA, 21 nt, Artificial Sequence
  Synthetic
cggagcuggccuacaugaacg

SEQ ID NO: 8227 - RNA, 22 nt, Artificial Sequence
  Synthetic
ccggagcuggccuacaugaacg

SEQ ID NO: 8228 - RNA, 23 nt, Artificial Sequence
  Synthetic
uccggagcuggccuacaugaacg

SEQ ID NO: 8229 - RNA, 24 nt, Artificial Sequence
  Synthetic
uuccggagcuggccuacaugaacg

SEQ ID NO: 8230 - RNA, 18 nt, Artificial Sequence
  Synthetic
gccaucgcccugcucacg

SEQ ID NO: 8231 - RNA, 19 nt, Artificial Sequence
  Synthetic
ggccaucgcccugcucacg

SEQ ID NO: 8232 - RNA, 21 nt, Artificial Sequence
  Synthetic
gaggccaucgcccugcucacg

SEQ ID NO: 8233 - RNA, 22 nt, Artificial Sequence
  Synthetic
cgaggccaucgcccugcucacg

SEQ ID NO: 8234 - RNA, 23 nt, Artificial Sequence
  Synthetic
ccgaggccaucgcccugcucacg

SEQ ID NO: 8235 - RNA, 24 nt, Artificial Sequence
  Synthetic
accgaggccaucgcccugcucacg

SEQ ID NO: 8236 - RNA, 18 nt, Artificial Sequence
  Synthetic
gaccaagauuaucgaccg

SEQ ID NO: 8237 - RNA, 19 nt, Artificial Sequence
  Synthetic
ugaccaagauuaucgaccg

SEQ ID NO: 8238 - RNA, 21 nt, Artificial Sequence
  Synthetic
caugaccaagauuaucgaccg

SEQ ID NO: 8239 - RNA, 22 nt, Artificial Sequence
  Synthetic
acaugaccaagauuaucgaccg

SEQ ID NO: 8240 - RNA, 23 nt, Artificial Sequence
  Synthetic
uacaugaccaagauuaucgaccg

SEQ ID NO: 8241 - RNA, 24 nt, Artificial Sequence
  Synthetic
uuacaugaccaagauuaucgaccg

SEQ ID NO: 8242 - RNA, 18 nt, Artificial Sequence
  Synthetic
ccaucgcccugcucacgg

SEQ ID NO: 8243 - RNA, 19 nt, Artificial Sequence
  Synthetic
gccaucgcccugcucacgg

SEQ ID NO: 8244 - RNA, 21 nt, Artificial Sequence
  Synthetic
aggccaucgcccugcucacgg

SEQ ID NO: 8245 - RNA, 22 nt, Artificial Sequence
  Synthetic
gaggccaucgcccugcucacgg

SEQ ID NO: 8246 - RNA, 23 nt, Artificial Sequence
  Synthetic
cgaggccaucgcccugcucacgg

SEQ ID NO: 8247 - RNA, 24 nt, Artificial Sequence
  Synthetic
ccgaggccaucgcccugcucacgg

SEQ ID NO: 8248 - RNA, 18 nt, Artificial Sequence
  Synthetic
ucacgggggaggcccugg

SEQ ID NO: 8249 - RNA, 19 nt, Artificial Sequence
  Synthetic
cucacgggggaggcccugg

SEQ ID NO: 8250 - RNA, 21 nt, Artificial Sequence
  Synthetic
ugcucacgggggaggcccugg

SEQ ID NO: 8251 - RNA, 22 nt, Artificial Sequence
  Synthetic
cugcucacgggggaggcccugg

SEQ ID NO: 8252 - RNA, 23 nt, Artificial Sequence
  Synthetic
ccugcucacgggggaggcccugg

SEQ ID NO: 8253 - RNA, 24 nt, Artificial Sequence
  Synthetic
cccugcucacgggggaggcccugg

SEQ ID NO: 8254 - RNA, 18 nt, Artificial Sequence
  Synthetic
gucgaguucgacgcccug

SEQ ID NO: 8255 - RNA, 19 nt, Artificial Sequence
  Synthetic
cgucgaguucgacgcccug

SEQ ID NO: 8256 - RNA, 21 nt, Artificial Sequence
  Synthetic
gacgucgaguucgacgcccug

SEQ ID NO: 8257 - RNA, 22 nt, Artificial Sequence
  Synthetic
cgacgucgaguucgacgcccug

SEQ ID NO: 8258 - RNA, 23 nt, Artificial Sequence
  Synthetic
acgacgucgaguucgacgcccug

SEQ ID NO: 8259 - RNA, 24 nt, Artificial Sequence
  Synthetic
uacgacgucgaguucgacgcccug

SEQ ID NO: 8260 - RNA, 18 nt, Artificial Sequence
  Synthetic
gcucccaaccgcgacccu

SEQ ID NO: 8261 - RNA, 19 nt, Artificial Sequence
  Synthetic
cgcucccaaccgcgacccu

SEQ ID NO: 8262 - RNA, 21 nt, Artificial Sequence
  Synthetic
gccgcucccaaccgcgacccu

SEQ ID NO: 8263 - RNA, 22 nt, Artificial Sequence
  Synthetic
ggccgcucccaaccgcgacccu

SEQ ID NO: 8264 - RNA, 23 nt, Artificial Sequence
  Synthetic
uggccgcucccaaccgcgacccu

SEQ ID NO: 8265 - RNA, 24 nt, Artificial Sequence
  Synthetic
auggccgcucccaaccgcgacccu

SEQ ID NO: 8266 - RNA, 18 nt, Artificial Sequence
  Synthetic
caacguccaggccguccu

SEQ ID NO: 8267 - RNA, 19 nt, Artificial Sequence
  Synthetic
gcaacguccaggccguccu

SEQ ID NO: 8268 - RNA, 21 nt, Artificial Sequence
  Synthetic
ucgcaacguccaggccguccu

SEQ ID NO: 8269 - RNA, 22 nt, Artificial Sequence
  Synthetic
cucgcaacguccaggccguccu

SEQ ID NO: 8270 - RNA, 23 nt, Artificial Sequence
  Synthetic
gcucgcaacguccaggccguccu

SEQ ID NO: 8271 - RNA, 24 nt, Artificial Sequence
  Synthetic
cgcucgcaacguccaggccguccu

SEQ ID NO: 8272 - RNA, 18 nt, Artificial Sequence
  Synthetic
acgaggggcgcguacagu

SEQ ID NO: 8273 - RNA, 19 nt, Artificial Sequence
  Synthetic
aacgaggggcgcguacagu

SEQ ID NO: 8274 - RNA, 21 nt, Artificial Sequence
  Synthetic
ugaacgaggggcgcguacagu

SEQ ID NO: 8275 - RNA, 22 nt, Artificial Sequence
  Synthetic
augaacgaggggcgcguacagu

SEQ ID NO: 8276 - RNA, 23 nt, Artificial Sequence
  Synthetic
caugaacgaggggcgcguacagu

SEQ ID NO: 8277 - RNA, 24 nt, Artificial Sequence
  Synthetic
acaugaacgaggggcgcguacagu

SEQ ID NO: 8278 - RNA, 18 nt, Artificial Sequence
  Synthetic
cugucgcucgugcgcuuu

SEQ ID NO: 8279 - RNA, 19 nt, Artificial Sequence
  Synthetic
ccugucgcucgugcgcuuu

SEQ ID NO: 8280 - RNA, 21 nt, Artificial Sequence
  Synthetic
acccugucgcucgugcgcuuu

SEQ ID NO: 8281 - RNA, 22 nt, Artificial Sequence
  Synthetic
cacccugucgcucgugcgcuuu

SEQ ID NO: 8282 - RNA, 23 nt, Artificial Sequence
  Synthetic
acacccugucgcucgugcgcuuu

SEQ ID NO: 8283 - RNA, 24 nt, Artificial Sequence
  Synthetic
aacacccugucgcucgugcgcuuu

SEQ ID NO: 8284 - RNA, 18 nt, Artificial Sequence
  Synthetic
ugcguguguaccaaguuu

SEQ ID NO: 8285 - RNA, 19 nt, Artificial Sequence
  Synthetic
gugcguguguaccaaguuu

SEQ ID NO: 8286 - RNA, 21 nt, Artificial Sequence
  Synthetic
gcgugcguguguaccaaguuu

SEQ ID NO: 8287 - RNA, 22 nt, Artificial Sequence
  Synthetic
ggcgugcguguguaccaaguuu

SEQ ID NO: 8288 - RNA, 23 nt, Artificial Sequence
  Synthetic
uggcgugcguguguaccaaguuu

SEQ ID NO: 8289 - RNA, 24 nt, Artificial Sequence
  Synthetic
guggcgugcguguguaccaaguuu

SEQ ID NO: 8290 - RNA, 18 nt, Artificial Sequence
  Synthetic
gacgagauacugcgcgaa

SEQ ID NO: 8291 - RNA, 24 nt, Artificial Sequence
  Synthetic
gucauagacgagauacugcgcgaa

SEQ ID NO: 8292 - RNA, 18 nt, Artificial Sequence
  Synthetic
gguccauggcgcccacca

SEQ ID NO: 8293 - RNA, 22 nt, Artificial Sequence
  Synthetic
gucagguccauggcgcccacca

SEQ ID NO: 8294 - RNA, 19 nt, Artificial Sequence
  Synthetic
gucacgacguacgagacca

SEQ ID NO: 8295 - RNA, 23 nt, Artificial Sequence
  Synthetic
guaggucacgacguacgagacca

SEQ ID NO: 8296 - RNA, 24 nt, Artificial Sequence
  Synthetic
gguaggucacgacguacgagacca

SEQ ID NO: 8297 - RNA, 22 nt, Artificial Sequence
  Synthetic
gccaccagauuggccgggugca

SEQ ID NO: 8298 - RNA, 23 nt, Artificial Sequence
  Synthetic
ggccaccagauuggccgggugca

SEQ ID NO: 8299 - RNA, 18 nt, Artificial Sequence
  Synthetic
ggugcgcgggguccguca

SEQ ID NO: 8300 - RNA, 19 nt, Artificial Sequence
  Synthetic
gggugcgcgggguccguca

SEQ ID NO: 8301 - RNA, 21 nt, Artificial Sequence
  Synthetic
gggggugcgcgggguccguca

SEQ ID NO: 8302 - RNA, 24 nt, Artificial Sequence
  Synthetic
gcagggggugcgcgggguccguca

SEQ ID NO: 8303 - RNA, 22 nt, Artificial Sequence
  Synthetic
gcgaacagcgcguggacgggga

SEQ ID NO: 8304 - RNA, 23 nt, Artificial Sequence
  Synthetic
ggcgaacagcgcguggacgggga

SEQ ID NO: 8305 - RNA, 19 nt, Artificial Sequence
  Synthetic
gcggcaaaccguuccauga

SEQ ID NO: 8306 - RNA, 21 nt, Artificial Sequence
  Synthetic
gcgcggcaaaccguuccauga

SEQ ID NO: 8307 - RNA, 23 nt, Artificial Sequence
  Synthetic
gugcgcggcaaaccguuccauga

SEQ ID NO: 8308 - RNA, 18 nt, Artificial Sequence
  Synthetic
ggucgcuggcgcagguga

SEQ ID NO: 8309 - RNA, 19 nt, Artificial Sequence
  Synthetic
gggucgcuggcgcagguga

SEQ ID NO: 8310 - RNA, 22 nt, Artificial Sequence
  Synthetic
gcggggucgcuggcgcagguga

SEQ ID NO: 8311 - RNA, 23 nt, Artificial Sequence
  Synthetic
ggcggggucgcuggcgcagguga

SEQ ID NO: 8312 - RNA, 24 nt, Artificial Sequence
  Synthetic
gggcggggucgcuggcgcagguga

SEQ ID NO: 8313 - RNA, 18 nt, Artificial Sequence
  Synthetic
gguugcccaugucgguga

SEQ ID NO: 8314 - RNA, 21 nt, Artificial Sequence
  Synthetic
gaagguugcccaugucgguga

SEQ ID NO: 8315 - RNA, 22 nt, Artificial Sequence
  Synthetic
ggaagguugcccaugucgguga

SEQ ID NO: 8316 - RNA, 23 nt, Artificial Sequence
  Synthetic
gggaagguugcccaugucgguga

SEQ ID NO: 8317 - RNA, 24 nt, Artificial Sequence
  Synthetic
ggggaagguugcccaugucgguga

SEQ ID NO: 8318 - RNA, 18 nt, Artificial Sequence
  Synthetic
guugacgucggucgacac

SEQ ID NO: 8319 - RNA, 21 nt, Artificial Sequence
  Synthetic
guaguugacgucggucgacac

SEQ ID NO: 8320 - RNA, 24 nt, Artificial Sequence
  Synthetic
gaaguaguugacgucggucgacac

SEQ ID NO: 8321 - RNA, 19 nt, Artificial Sequence
  Synthetic
gccuccugaaacaggccac

SEQ ID NO: 8322 - RNA, 23 nt, Artificial Sequence
  Synthetic
guaggccuccugaaacaggccac

SEQ ID NO: 8323 - RNA, 24 nt, Artificial Sequence
  Synthetic
gguaggccuccugaaacaggccac

SEQ ID NO: 8324 - RNA, 21 nt, Artificial Sequence
  Synthetic
gcuucgcuuuagcucggcgac

SEQ ID NO: 8325 - RNA, 24 nt, Artificial Sequence
  Synthetic
gaagcuucgcuuuagcucggcgac

SEQ ID NO: 8326 - RNA, 21 nt, Artificial Sequence
  Synthetic
ggacgacggugaacccaaacc

SEQ ID NO: 8327 - RNA, 24 nt, Artificial Sequence
  Synthetic
gucggacgacggugaacccaaacc

SEQ ID NO: 8328 - RNA, 19 nt, Artificial Sequence
  Synthetic
gaaaaucgcugcgacgccc

SEQ ID NO: 8329 - RNA, 23 nt, Artificial Sequence
  Synthetic
guacgaaaaucgcugcgacgccc

SEQ ID NO: 8330 - RNA, 23 nt, Artificial Sequence
  Synthetic
gaaacaggccacacggguccucc

SEQ ID NO: 8331 - RNA, 18 nt, Artificial Sequence
  Synthetic
ggcggggcgggaaggcgc

SEQ ID NO: 8332 - RNA, 21 nt, Artificial Sequence
  Synthetic
gcuggcggggcgggaaggcgc

SEQ ID NO: 8333 - RNA, 18 nt, Artificial Sequence
  Synthetic
ggcguccgcggcucgggc

SEQ ID NO: 8334 - RNA, 21 nt, Artificial Sequence
  Synthetic
guucaccacgcgccagguggc

SEQ ID NO: 8335 - RNA, 24 nt, Artificial Sequence
  Synthetic
gccguucaccacgcgccagguggc

SEQ ID NO: 8336 - RNA, 18 nt, Artificial Sequence
  Synthetic
gggcugcauaaacugcuc

SEQ ID NO: 8337 - RNA, 21 nt, Artificial Sequence
  Synthetic
gucgggcugcauaaacugcuc

SEQ ID NO: 8338 - RNA, 24 nt, Artificial Sequence
  Synthetic
guugucgggcugcauaaacugcuc

SEQ ID NO: 8339 - RNA, 19 nt, Artificial Sequence
  Synthetic
gaugcuggggggccaucag

SEQ ID NO: 8340 - RNA, 24 nt, Artificial Sequence
  Synthetic
guccagaugcuggggggccaucag

SEQ ID NO: 8341 - RNA, 18 nt, Artificial Sequence
  Synthetic
gcgucacagucccacacg

SEQ ID NO: 8342 - RNA, 19 nt, Artificial Sequence
  Synthetic
ggcgucacagucccacacg

SEQ ID NO: 8343 - RNA, 18 nt, Artificial Sequence
  Synthetic
gcagcagguaaaacaccg

SEQ ID NO: 8344 - RNA, 22 nt, Artificial Sequence
  Synthetic
gccugcagcagguaaaacaccg

SEQ ID NO: 8345 - RNA, 23 nt, Artificial Sequence
  Synthetic
ggccugcagcagguaaaacaccg

SEQ ID NO: 8346 - RNA, 22 nt, Artificial Sequence
  Synthetic
gauuccggcgugcaacgccccg

SEQ ID NO: 8347 - RNA, 23 nt, Artificial Sequence
  Synthetic
ggauuccggcgugcaacgccccg

SEQ ID NO: 8348 - RNA, 19 nt, Artificial Sequence
  Synthetic
gcgucaacguucaucagcg

SEQ ID NO: 8349 - RNA, 22 nt, Artificial Sequence
  Synthetic
gccgcgucaacguucaucagcg

SEQ ID NO: 8350 - RNA, 19 nt, Artificial Sequence
  Synthetic
gccgggugcagggggugcg

SEQ ID NO: 8351 - RNA, 24 nt, Artificial Sequence
  Synthetic
gauuggccgggugcagggggugcg

SEQ ID NO: 8352 - RNA, 18 nt, Artificial Sequence
  Synthetic
guccacguucgcgcgcgg

SEQ ID NO: 8353 - RNA, 19 nt, Artificial Sequence
  Synthetic
gguccacguucgcgcgcgg

SEQ ID NO: 8354 - RNA, 24 nt, Artificial Sequence
  Synthetic
gcccagguccacguucgcgcgcgg

SEQ ID NO: 8355 - RNA, 18 nt, Artificial Sequence
  Synthetic
gggcacugcggaggaggg

SEQ ID NO: 8356 - RNA, 23 nt, Artificial Sequence
  Synthetic
guugcgggcacugcggaggaggg

SEQ ID NO: 8357 - RNA, 19 nt, Artificial Sequence
  Synthetic
guggccgcgaaggcccggg

SEQ ID NO: 8358 - RNA, 22 nt, Artificial Sequence
  Synthetic
gccguggccgcgaaggcccggg

SEQ ID NO: 8359 - RNA, 23 nt, Artificial Sequence
  Synthetic
ggccguggccgcgaaggcccggg

SEQ ID NO: 8360 - RNA, 19 nt, Artificial Sequence
  Synthetic
guguuggccaccagauugg

SEQ ID NO: 8361 - RNA, 23 nt, Artificial Sequence
  Synthetic
gaccguguuggccaccagauugg

SEQ ID NO: 8362 - RNA, 18 nt, Artificial Sequence
  Synthetic
gugcugcacgacgggcug

SEQ ID NO: 8363 - RNA, 21 nt, Artificial Sequence
  Synthetic
gacgugcugcacgacgggcug

SEQ ID NO: 8364 - RNA, 22 nt, Artificial Sequence
  Synthetic
ggacgugcugcacgacgggcug

SEQ ID NO: 8365 - RNA, 24 nt, Artificial Sequence
  Synthetic
gcggacgugcugcacgacgggcug

SEQ ID NO: 8366 - RNA, 24 nt, Artificial Sequence
  Synthetic
gaucuccgggaccaccauguucug

SEQ ID NO: 8367 - RNA, 18 nt, Artificial Sequence
  Synthetic
gcgggaaggcgcggggau

SEQ ID NO: 8368 - RNA, 19 nt, Artificial Sequence
  Synthetic
ggcgggaaggcgcggggau

SEQ ID NO: 8369 - RNA, 21 nt, Artificial Sequence
  Synthetic
ggggcgggaaggcgcggggau

SEQ ID NO: 8370 - RNA, 23 nt, Artificial Sequence
  Synthetic
gcggggcgggaaggcgcggggau

SEQ ID NO: 8371 - RNA, 24 nt, Artificial Sequence
  Synthetic
ggcggggcgggaaggcgcggggau

SEQ ID NO: 8372 - RNA, 19 nt, Artificial Sequence
  Synthetic
gccgccacguacgccccgu

SEQ ID NO: 8373 - RNA, 21 nt, Artificial Sequence
  Synthetic
gggccgccacguacgccccgu

SEQ ID NO: 8374 - RNA, 22 nt, Artificial Sequence
  Synthetic
ggggccgccacguacgccccgu

SEQ ID NO: 8375 - RNA, 18 nt, Artificial Sequence
  Synthetic
gcccagcuccgggccggu

SEQ ID NO: 8376 - RNA, 22 nt, Artificial Sequence
  Synthetic
gcccgcccagcuccgggccggu

SEQ ID NO: 8377 - RNA, 18 nt, Artificial Sequence
  Synthetic
guaaaaauagucgccauu

SEQ ID NO: 8378 - RNA, 19 nt, Artificial Sequence
  Synthetic
gguaaaaauagucgccauu

SEQ ID NO: 8379 - RNA, 21 nt, Artificial Sequence
  Synthetic
gggguaaaaauagucgccauu

SEQ ID NO: 8380 - RNA, 22 nt, Artificial Sequence
  Synthetic
ggggguaaaaauagucgccauu

SEQ ID NO: 8381 - RNA, 24 nt, Artificial Sequence
  Synthetic
gaggggguaaaaauagucgccauu

SEQ ID NO: 8382 - RNA, 18 nt, Artificial Sequence
  Synthetic
gcgcgggcggccggucga

SEQ ID NO: 8383 - RNA, 23 nt, Artificial Sequence
  Synthetic
gacacgcgcgggcggccggucga

SEQ ID NO: 8384 - RNA, 18 nt, Artificial Sequence
  Synthetic
guccccgcccccggccac

SEQ ID NO: 8385 - RNA, 24 nt, Artificial Sequence
  Synthetic
gaccuaguccccgcccccggccac

SEQ ID NO: 8386 - RNA, 21 nt, Artificial Sequence
  Synthetic
ggacaacggccgccuggccac

SEQ ID NO: 8387 - RNA, 19 nt, Artificial Sequence
  Synthetic
guacaguuuaagcgccccc

SEQ ID NO: 8388 - RNA, 22 nt, Artificial Sequence
  Synthetic
gacguacaguuuaagcgccccc

SEQ ID NO: 8389 - RNA, 24 nt, Artificial Sequence
  Synthetic
gcgacguacaguuuaagcgccccc

SEQ ID NO: 8390 - RNA, 18 nt, Artificial Sequence
  Synthetic
gcccgagccgcggacgcc

SEQ ID NO: 8391 - RNA, 19 nt, Artificial Sequence
  Synthetic
ggcccgagccgcggacgcc

SEQ ID NO: 8392 - RNA, 18 nt, Artificial Sequence
  Synthetic
gggccgcugcugcaccgc

SEQ ID NO: 8393 - RNA, 19 nt, Artificial Sequence
  Synthetic
ggggccgcugcugcaccgc

SEQ ID NO: 8394 - RNA, 21 nt, Artificial Sequence
  Synthetic
gcggggccgcugcugcaccgc

SEQ ID NO: 8395 - RNA, 22 nt, Artificial Sequence
  Synthetic
gcgcccaggugccgcggcgcgc

SEQ ID NO: 8396 - RNA, 24 nt, Artificial Sequence
  Synthetic
gugcgcccaggugccgcggcgcgc

SEQ ID NO: 8397 - RNA, 24 nt, Artificial Sequence
  Synthetic
gccccccagacgacgcgcgugcgc

SEQ ID NO: 8398 - RNA, 18 nt, Artificial Sequence
  Synthetic
gggcaggcgcaagccgag

SEQ ID NO: 8399 - RNA, 21 nt, Artificial Sequence
  Synthetic
ggcgggcaggcgcaagccgag

SEQ ID NO: 8400 - RNA, 22 nt, Artificial Sequence
  Synthetic
gggcgggcaggcgcaagccgag

SEQ ID NO: 8401 - RNA, 21 nt, Artificial Sequence
  Synthetic
guuuacgcgggggacaaggag

SEQ ID NO: 8402 - RNA, 23 nt, Artificial Sequence
  Synthetic
gcguuuacgcgggggacaaggag

SEQ ID NO: 8403 - RNA, 24 nt, Artificial Sequence
  Synthetic
ggcguuuacgcgggggacaaggag

SEQ ID NO: 8404 - RNA, 18 nt, Artificial Sequence
  Synthetic
gagcgccugaucguggag

SEQ ID NO: 8405 - RNA, 19 nt, Artificial Sequence
  Synthetic
ggagcgccugaucguggag

SEQ ID NO: 8406 - RNA, 23 nt, Artificial Sequence
  Synthetic
gccuggagcgccugaucguggag

SEQ ID NO: 8407 - RNA, 18 nt, Artificial Sequence
  Synthetic
ggcccacgggcggguccg

SEQ ID NO: 8408 - RNA, 22 nt, Artificial Sequence
  Synthetic
gccuggcccacgggcggguccg

SEQ ID NO: 8409 - RNA, 24 nt, Artificial Sequence
  Synthetic
gcgccuggcccacgggcggguccg

SEQ ID NO: 8410 - RNA, 22 nt, Artificial Sequence
  Synthetic
gucccggagaucgcccccggcg

SEQ ID NO: 8411 - RNA, 23 nt, Artificial Sequence
  Synthetic
ggucccggagaucgcccccggcg

SEQ ID NO: 8412 - RNA, 18 nt, Artificial Sequence
  Synthetic
gcagcgccuggcccacgg

SEQ ID NO: 8413 - RNA, 19 nt, Artificial Sequence
  Synthetic
ggcagcgccuggcccacgg

SEQ ID NO: 8414 - RNA, 21 nt, Artificial Sequence
  Synthetic
ggggcagcgccuggcccacgg

SEQ ID NO: 8415 - RNA, 22 nt, Artificial Sequence
  Synthetic
gggggcagcgccuggcccacgg

SEQ ID NO: 8416 - RNA, 21 nt, Artificial Sequence
  Synthetic
ggcccggcacgaaacuggcgg

SEQ ID NO: 8417 - RNA, 23 nt, Artificial Sequence
  Synthetic
guggcccggcacgaaacuggcgg

SEQ ID NO: 8418 - RNA, 24 nt, Artificial Sequence
  Synthetic
gguggcccggcacgaaacuggcgg

SEQ ID NO: 8419 - RNA, 22 nt, Artificial Sequence
  Synthetic
gcgcugaccuacgcgcucaugg

SEQ ID NO: 8420 - RNA, 18 nt, Artificial Sequence
  Synthetic
ggaccgccaucgcgacug

SEQ ID NO: 8421 - RNA, 23 nt, Artificial Sequence
  Synthetic
gcccuggaccgccaucgcgacug

SEQ ID NO: 8422 - RNA, 24 nt, Artificial Sequence
  Synthetic
ggcccuggaccgccaucgcgacug

SEQ ID NO: 8423 - RNA, 24 nt, Artificial Sequence
  Synthetic
guaauaaaccgccccgcccuuccu

SEQ ID NO: 8424 - RNA, 21 nt, Artificial Sequence
  Synthetic
ggacgcccggggccuggagcu

SEQ ID NO: 8425 - RNA, 22 nt, Artificial Sequence
  Synthetic
gggacgcccggggccuggagcu

SEQ ID NO: 8426 - RNA, 19 nt, Artificial Sequence
  Synthetic
gcccagcccguccccgugu

SEQ ID NO: 8427 - RNA, 23 nt, Artificial Sequence
  Synthetic
gccggcccagcccguccccgugu

SEQ ID NO: 8428 - RNA, 24 nt, Artificial Sequence
  Synthetic
ggccggcccagcccguccccgugu

SEQ ID NO: 8429 - RNA, 22 nt, Artificial Sequence
  Synthetic
gaccacggccaggacgccgugu

SEQ ID NO: 8430 - RNA, 23 nt, Artificial Sequence
  Synthetic
ggaccacggccaggacgccgugu

SEQ ID NO: 8431 - RNA, 24 nt, Artificial Sequence
  Synthetic
gcaccccgcguucgacuucuuugu

SEQ ID NO: 8432 - RNA, 19 nt, Artificial Sequence
  Synthetic
agacgagauacugcgcgaa

SEQ ID NO: 8433 - RNA, 21 nt, Artificial Sequence
  Synthetic
auagacgagauacugcgcgaa

SEQ ID NO: 8434 - RNA, 22 nt, Artificial Sequence
  Synthetic
cauagacgagauacugcgcgaa

SEQ ID NO: 8435 - RNA, 23 nt, Artificial Sequence
  Synthetic
ucauagacgagauacugcgcgaa

SEQ ID NO: 8436 - RNA, 18 nt, Artificial Sequence
  Synthetic
uacaugccgccgcguaca

SEQ ID NO: 8437 - RNA, 19 nt, Artificial Sequence
  Synthetic
uuacaugccgccgcguaca

SEQ ID NO: 8438 - RNA, 21 nt, Artificial Sequence
  Synthetic
cguuacaugccgccgcguaca

SEQ ID NO: 8439 - RNA, 22 nt, Artificial Sequence
  Synthetic
acguuacaugccgccgcguaca

SEQ ID NO: 8440 - RNA, 23 nt, Artificial Sequence
  Synthetic
cacguuacaugccgccgcguaca

SEQ ID NO: 8441 - RNA, 24 nt, Artificial Sequence
  Synthetic
ccacguuacaugccgccgcguaca

SEQ ID NO: 8442 - RNA, 19 nt, Artificial Sequence
  Synthetic
agguccauggcgcccacca

SEQ ID NO: 8443 - RNA, 21 nt, Artificial Sequence
  Synthetic
ucagguccauggcgcccacca

SEQ ID NO: 8444 - RNA, 23 nt, Artificial Sequence
  Synthetic
cgucagguccauggcgcccacca

SEQ ID NO: 8445 - RNA, 24 nt, Artificial Sequence
  Synthetic
acgucagguccauggcgcccacca

SEQ ID NO: 8446 - RNA, 18 nt, Artificial Sequence
  Synthetic
ucacgacguacgagacca

SEQ ID NO: 8447 - RNA, 21 nt, Artificial Sequence
  Synthetic
aggucacgacguacgagacca

SEQ ID NO: 8448 - RNA, 22 nt, Artificial Sequence
  Synthetic
uaggucacgacguacgagacca

SEQ ID NO: 8449 - RNA, 18 nt, Artificial Sequence
  Synthetic
ccagauuggccgggugca

SEQ ID NO: 8450 - RNA, 19 nt, Artificial Sequence
  Synthetic
accagauuggccgggugca

SEQ ID NO: 8451 - RNA, 21 nt, Artificial Sequence
  Synthetic
ccaccagauuggccgggugca

SEQ ID NO: 8452 - RNA, 24 nt, Artificial Sequence
  Synthetic
uggccaccagauuggccgggugca

SEQ ID NO: 8453 - RNA, 22 nt, Artificial Sequence
  Synthetic
agggggugcgcgggguccguca

SEQ ID NO: 8454 - RNA, 23 nt, Artificial Sequence
  Synthetic
cagggggugcgcgggguccguca

SEQ ID NO: 8455 - RNA, 18 nt, Artificial Sequence
  Synthetic
acggauuggcggcuucga

SEQ ID NO: 8456 - RNA, 19 nt, Artificial Sequence
  Synthetic
uacggauuggcggcuucga

SEQ ID NO: 8457 - RNA, 21 nt, Artificial Sequence
  Synthetic
cguacggauuggcggcuucga

SEQ ID NO: 8458 - RNA, 22 nt, Artificial Sequence
  Synthetic
ccguacggauuggcggcuucga

SEQ ID NO: 8459 - RNA, 23 nt, Artificial Sequence
  Synthetic
cccguacggauuggcggcuucga

SEQ ID NO: 8460 - RNA, 24 nt, Artificial Sequence
  Synthetic
ccccguacggauuggcggcuucga

SEQ ID NO: 8461 - RNA, 18 nt, Artificial Sequence
  Synthetic
acagcgcguggacgggga

SEQ ID NO: 8462 - RNA, 19 nt, Artificial Sequence
  Synthetic
aacagcgcguggacgggga

SEQ ID NO: 8463 - RNA, 21 nt, Artificial Sequence
  Synthetic
cgaacagcgcguggacgggga

SEQ ID NO: 8464 - RNA, 24 nt, Artificial Sequence
  Synthetic
cggcgaacagcgcguggacgggga

SEQ ID NO: 8465 - RNA, 18 nt, Artificial Sequence
  Synthetic
cggcaaaccguuccauga

SEQ ID NO: 8466 - RNA, 22 nt, Artificial Sequence
  Synthetic
ugcgcggcaaaccguuccauga

SEQ ID NO: 8467 - RNA, 24 nt, Artificial Sequence
  Synthetic
cgugcgcggcaaaccguuccauga

SEQ ID NO: 8468 - RNA, 21 nt, Artificial Sequence
  Synthetic
cggggucgcuggcgcagguga

SEQ ID NO: 8469 - RNA, 19 nt, Artificial Sequence
  Synthetic
agguugcccaugucgguga

SEQ ID NO: 8470 - RNA, 19 nt, Artificial Sequence
  Synthetic
aguugacgucggucgacac

SEQ ID NO: 8471 - RNA, 22 nt, Artificial Sequence
  Synthetic
aguaguugacgucggucgacac

SEQ ID NO: 8472 - RNA, 23 nt, Artificial Sequence
  Synthetic
aaguaguugacgucggucgacac

SEQ ID NO: 8473 - RNA, 18 nt, Artificial Sequence
  Synthetic
ccuccugaaacaggccac

SEQ ID NO: 8474 - RNA, 21 nt, Artificial Sequence
  Synthetic
aggccuccugaaacaggccac

SEQ ID NO: 8475 - RNA, 22 nt, Artificial Sequence
  Synthetic
uaggccuccugaaacaggccac

SEQ ID NO: 8476 - RNA, 18 nt, Artificial Sequence
  Synthetic
ucgcuuuagcucggcgac

SEQ ID NO: 8477 - RNA, 19 nt, Artificial Sequence
  Synthetic
uucgcuuuagcucggcgac

SEQ ID NO: 8478 - RNA, 22 nt, Artificial Sequence
  Synthetic
agcuucgcuuuagcucggcgac

SEQ ID NO: 8479 - RNA, 23 nt, Artificial Sequence
  Synthetic
aagcuucgcuuuagcucggcgac

SEQ ID NO: 8480 - RNA, 18 nt, Artificial Sequence
  Synthetic
cgacggugaacccaaacc

SEQ ID NO: 8481 - RNA, 19 nt, Artificial Sequence
  Synthetic
acgacggugaacccaaacc

SEQ ID NO: 8482 - RNA, 22 nt, Artificial Sequence
  Synthetic
cggacgacggugaacccaaacc

SEQ ID NO: 8483 - RNA, 23 nt, Artificial Sequence
  Synthetic
ucggacgacggugaacccaaacc

SEQ ID NO: 8484 - RNA, 18 nt, Artificial Sequence
  Synthetic
ccccggcggcgcgucccc

SEQ ID NO: 8485 - RNA, 19 nt, Artificial Sequence
  Synthetic
cccccggcggcgcgucccc

SEQ ID NO: 8486 - RNA, 21 nt, Artificial Sequence
  Synthetic
cgcccccggcggcgcgucccc

SEQ ID NO: 8487 - RNA, 22 nt, Artificial Sequence
  Synthetic
acgcccccggcggcgcgucccc

SEQ ID NO: 8488 - RNA, 23 nt, Artificial Sequence
  Synthetic
aacgcccccggcggcgcgucccc

SEQ ID NO: 8489 - RNA, 24 nt, Artificial Sequence
  Synthetic
aaacgcccccggcggcgcgucccc

SEQ ID NO: 8490 - RNA, 18 nt, Artificial Sequence
  Synthetic
aaaaucgcugcgacgccc

SEQ ID NO: 8491 - RNA, 21 nt, Artificial Sequence
  Synthetic
acgaaaaucgcugcgacgccc

SEQ ID NO: 8492 - RNA, 22 nt, Artificial Sequence
  Synthetic
uacgaaaaucgcugcgacgccc

SEQ ID NO: 8493 - RNA, 24 nt, Artificial Sequence
  Synthetic
cguacgaaaaucgcugcgacgccc

SEQ ID NO: 8494 - RNA, 18 nt, Artificial Sequence
  Synthetic
aggccacacggguccucc

SEQ ID NO: 8495 - RNA, 19 nt, Artificial Sequence
  Synthetic
caggccacacggguccucc

SEQ ID NO: 8496 - RNA, 21 nt, Artificial Sequence
  Synthetic
aacaggccacacggguccucc

SEQ ID NO: 8497 - RNA, 22 nt, Artificial Sequence
  Synthetic
aaacaggccacacggguccucc

SEQ ID NO: 8498 - RNA, 24 nt, Artificial Sequence
  Synthetic
ugaaacaggccacacggguccucc

SEQ ID NO: 8499 - RNA, 18 nt, Artificial Sequence
  Synthetic
agagccagucccuugagc

SEQ ID NO: 8500 - RNA, 19 nt, Artificial Sequence
  Synthetic
cagagccagucccuugagc

SEQ ID NO: 8501 - RNA, 21 nt, Artificial Sequence
  Synthetic
uacagagccagucccuugagc

SEQ ID NO: 8502 - RNA, 22 nt, Artificial Sequence
  Synthetic
uuacagagccagucccuugagc

SEQ ID NO: 8503 - RNA, 23 nt, Artificial Sequence
  Synthetic
auuacagagccagucccuugagc

SEQ ID NO: 8504 - RNA, 24 nt, Artificial Sequence
  Synthetic
uauuacagagccagucccuugagc

SEQ ID NO: 8505 - RNA, 19 nt, Artificial Sequence
  Synthetic
uggcggggcgggaaggcgc

SEQ ID NO: 8506 - RNA, 22 nt, Artificial Sequence
  Synthetic
agcuggcggggcgggaaggcgc

SEQ ID NO: 8507 - RNA, 23 nt, Artificial Sequence
  Synthetic
cagcuggcggggcgggaaggcgc

SEQ ID NO: 8508 - RNA, 24 nt, Artificial Sequence
  Synthetic
acagcuggcggggcgggaaggcgc

SEQ ID NO: 8509 - RNA, 19 nt, Artificial Sequence
  Synthetic
cggcguccgcggcucgggc

SEQ ID NO: 8510 - RNA, 21 nt, Artificial Sequence
  Synthetic
cgcggcguccgcggcucgggc

SEQ ID NO: 8511 - RNA, 22 nt, Artificial Sequence
  Synthetic
ccgcggcguccgcggcucgggc

SEQ ID NO: 8512 - RNA, 23 nt, Artificial Sequence
  Synthetic
uccgcggcguccgcggcucgggc

SEQ ID NO: 8513 - RNA, 24 nt, Artificial Sequence
  Synthetic
auccgcggcguccgcggcucgggc

SEQ ID NO: 8514 - RNA, 18 nt, Artificial Sequence
  Synthetic
caccacgcgccagguggc

SEQ ID NO: 8515 - RNA, 19 nt, Artificial Sequence
  Synthetic
ucaccacgcgccagguggc

SEQ ID NO: 8516 - RNA, 22 nt, Artificial Sequence
  Synthetic
cguucaccacgcgccagguggc

SEQ ID NO: 8517 - RNA, 23 nt, Artificial Sequence
  Synthetic
ccguucaccacgcgccagguggc

SEQ ID NO: 8518 - RNA, 19 nt, Artificial Sequence
  Synthetic
cgggcugcauaaacugcuc

SEQ ID NO: 8519 - RNA, 22 nt, Artificial Sequence
  Synthetic
ugucgggcugcauaaacugcuc

SEQ ID NO: 8520 - RNA, 23 nt, Artificial Sequence
  Synthetic
uugucgggcugcauaaacugcuc

SEQ ID NO: 8521 - RNA, 18 nt, Artificial Sequence
  Synthetic
augcuggggggccaucag

SEQ ID NO: 8522 - RNA, 21 nt, Artificial Sequence
  Synthetic
cagaugcuggggggccaucag

SEQ ID NO: 8523 - RNA, 22 nt, Artificial Sequence
  Synthetic
ccagaugcuggggggccaucag

SEQ ID NO: 8524 - RNA, 23 nt, Artificial Sequence
  Synthetic
uccagaugcuggggggccaucag

SEQ ID NO: 8525 - RNA, 18 nt, Artificial Sequence
  Synthetic
ccacaaagaagucgaacg

SEQ ID NO: 8526 - RNA, 19 nt, Artificial Sequence
  Synthetic
cccacaaagaagucgaacg

SEQ ID NO: 8527 - RNA, 21 nt, Artificial Sequence
  Synthetic
cccccacaaagaagucgaacg

SEQ ID NO: 8528 - RNA, 22 nt, Artificial Sequence
  Synthetic
acccccacaaagaagucgaacg

SEQ ID NO: 8529 - RNA, 23 nt, Artificial Sequence
  Synthetic
cacccccacaaagaagucgaacg

SEQ ID NO: 8530 - RNA, 24 nt, Artificial Sequence
  Synthetic
ccacccccacaaagaagucgaacg

SEQ ID NO: 8531 - RNA, 21 nt, Artificial Sequence
  Synthetic
agggcgucacagucccacacg

SEQ ID NO: 8532 - RNA, 22 nt, Artificial Sequence
  Synthetic
cagggcgucacagucccacacg

SEQ ID NO: 8533 - RNA, 23 nt, Artificial Sequence
  Synthetic
ucagggcgucacagucccacacg

SEQ ID NO: 8534 - RNA, 24 nt, Artificial Sequence
  Synthetic
aucagggcgucacagucccacacg

SEQ ID NO: 8535 - RNA, 19 nt, Artificial Sequence
  Synthetic
ugcagcagguaaaacaccg

SEQ ID NO: 8536 - RNA, 21 nt, Artificial Sequence
  Synthetic
ccugcagcagguaaaacaccg

SEQ ID NO: 8537 - RNA, 24 nt, Artificial Sequence
  Synthetic
cggccugcagcagguaaaacaccg

SEQ ID NO: 8538 - RNA, 18 nt, Artificial Sequence
  Synthetic
ccggcgugcaacgccccg

SEQ ID NO: 8539 - RNA, 19 nt, Artificial Sequence
  Synthetic
uccggcgugcaacgccccg

SEQ ID NO: 8540 - RNA, 21 nt, Artificial Sequence
  Synthetic
auuccggcgugcaacgccccg

SEQ ID NO: 8541 - RNA, 24 nt, Artificial Sequence
  Synthetic
aggauuccggcgugcaacgccccg

SEQ ID NO: 8542 - RNA, 18 nt, Artificial Sequence
  Synthetic
cgagggguggcagcagcg

SEQ ID NO: 8543 - RNA, 19 nt, Artificial Sequence
  Synthetic
acgagggguggcagcagcg

SEQ ID NO: 8544 - RNA, 21 nt, Artificial Sequence
  Synthetic
acacgagggguggcagcagcg

SEQ ID NO: 8545 - RNA, 22 nt, Artificial Sequence
  Synthetic
cacacgagggguggcagcagcg

SEQ ID NO: 8546 - RNA, 23 nt, Artificial Sequence
  Synthetic
ccacacgagggguggcagcagcg

SEQ ID NO: 8547 - RNA, 24 nt, Artificial Sequence
  Synthetic
cccacacgagggguggcagcagcg

SEQ ID NO: 8548 - RNA, 18 nt, Artificial Sequence
  Synthetic
cgucaacguucaucagcg

SEQ ID NO: 8549 - RNA, 21 nt, Artificial Sequence
  Synthetic
ccgcgucaacguucaucagcg

SEQ ID NO: 8550 - RNA, 23 nt, Artificial Sequence
  Synthetic
cgccgcgucaacguucaucagcg

SEQ ID NO: 8551 - RNA, 24 nt, Artificial Sequence
  Synthetic
ccgccgcgucaacguucaucagcg

SEQ ID NO: 8552 - RNA, 18 nt, Artificial Sequence
  Synthetic
ccgggugcagggggugcg

SEQ ID NO: 8553 - RNA, 21 nt, Artificial Sequence
  Synthetic
uggccgggugcagggggugcg

SEQ ID NO: 8554 - RNA, 22 nt, Artificial Sequence
  Synthetic
uuggccgggugcagggggugcg

SEQ ID NO: 8555 - RNA, 23 nt, Artificial Sequence
  Synthetic
auuggccgggugcagggggugcg

SEQ ID NO: 8556 - RNA, 21 nt, Artificial Sequence
  Synthetic
cagguccacguucgcgcgcgg

SEQ ID NO: 8557 - RNA, 22 nt, Artificial Sequence
  Synthetic
ccagguccacguucgcgcgcgg

SEQ ID NO: 8558 - RNA, 23 nt, Artificial Sequence
  Synthetic
cccagguccacguucgcgcgcgg

SEQ ID NO: 8559 - RNA, 19 nt, Artificial Sequence
  Synthetic
cgggcacugcggaggaggg

SEQ ID NO: 8560 - RNA, 21 nt, Artificial Sequence
  Synthetic
ugcgggcacugcggaggaggg

SEQ ID NO: 8561 - RNA, 22 nt, Artificial Sequence
  Synthetic
uugcgggcacugcggaggaggg

SEQ ID NO: 8562 - RNA, 24 nt, Artificial Sequence
  Synthetic
cguugcgggcacugcggaggaggg

SEQ ID NO: 8563 - RNA, 18 nt, Artificial Sequence
  Synthetic
uggccgcgaaggcccggg

SEQ ID NO: 8564 - RNA, 21 nt, Artificial Sequence
  Synthetic
ccguggccgcgaaggcccggg

SEQ ID NO: 8565 - RNA, 24 nt, Artificial Sequence
  Synthetic
uggccguggccgcgaaggcccggg

SEQ ID NO: 8566 - RNA, 18 nt, Artificial Sequence
  Synthetic
uguuggccaccagauugg

SEQ ID NO: 8567 - RNA, 21 nt, Artificial Sequence
  Synthetic
ccguguuggccaccagauugg

SEQ ID NO: 8568 - RNA, 22 nt, Artificial Sequence
  Synthetic
accguguuggccaccagauugg

SEQ ID NO: 8569 - RNA, 24 nt, Artificial Sequence
  Synthetic
ugaccguguuggccaccagauugg

SEQ ID NO: 8570 - RNA, 19 nt, Artificial Sequence
  Synthetic
cgugcugcacgacgggcug

SEQ ID NO: 8571 - RNA, 23 nt, Artificial Sequence
  Synthetic
cggacgugcugcacgacgggcug

SEQ ID NO: 8572 - RNA, 18 nt, Artificial Sequence
  Synthetic
cgggaccaccauguucug

SEQ ID NO: 8573 - RNA, 19 nt, Artificial Sequence
  Synthetic
ccgggaccaccauguucug

SEQ ID NO: 8574 - RNA, 21 nt, Artificial Sequence
  Synthetic
cuccgggaccaccauguucug

SEQ ID NO: 8575 - RNA, 22 nt, Artificial Sequence
  Synthetic
ucuccgggaccaccauguucug

SEQ ID NO: 8576 - RNA, 23 nt, Artificial Sequence
  Synthetic
aucuccgggaccaccauguucug

SEQ ID NO: 8577 - RNA, 22 nt, Artificial Sequence
  Synthetic
cggggcgggaaggcgcggggau

SEQ ID NO: 8578 - RNA, 18 nt, Artificial Sequence
  Synthetic
ccgccacguacgccccgu

SEQ ID NO: 8579 - RNA, 23 nt, Artificial Sequence
  Synthetic
cggggccgccacguacgccccgu

SEQ ID NO: 8580 - RNA, 24 nt, Artificial Sequence
  Synthetic
ccggggccgccacguacgccccgu

SEQ ID NO: 8581 - RNA, 19 nt, Artificial Sequence
  Synthetic
cgcccagcuccgggccggu

SEQ ID NO: 8582 - RNA, 21 nt, Artificial Sequence
  Synthetic
cccgcccagcuccgggccggu

SEQ ID NO: 8583 - RNA, 23 nt, Artificial Sequence
  Synthetic
ugcccgcccagcuccgggccggu

SEQ ID NO: 8584 - RNA, 24 nt, Artificial Sequence
  Synthetic
cugcccgcccagcuccgggccggu

SEQ ID NO: 8585 - RNA, 23 nt, Artificial Sequence
  Synthetic
aggggguaaaaauagucgccauu

SEQ ID NO: 8586 - RNA, 19 nt, Artificial Sequence
  Synthetic
cgcgcgggcggccggucga

SEQ ID NO: 8587 - RNA, 21 nt, Artificial Sequence
  Synthetic
cacgcgcgggcggccggucga

SEQ ID NO: 8588 - RNA, 22 nt, Artificial Sequence
  Synthetic
acacgcgcgggcggccggucga

SEQ ID NO: 8589 - RNA, 24 nt, Artificial Sequence
  Synthetic
cgacacgcgcgggcggccggucga

SEQ ID NO: 8590 - RNA, 19 nt, Artificial Sequence
  Synthetic
aguccccgcccccggccac

SEQ ID NO: 8591 - RNA, 21 nt, Artificial Sequence
  Synthetic
cuaguccccgcccccggccac

SEQ ID NO: 8592 - RNA, 22 nt, Artificial Sequence
  Synthetic
ccuaguccccgcccccggccac

SEQ ID NO: 8593 - RNA, 23 nt, Artificial Sequence
  Synthetic
accuaguccccgcccccggccac

SEQ ID NO: 8594 - RNA, 18 nt, Artificial Sequence
  Synthetic
caacggccgccuggccac

SEQ ID NO: 8595 - RNA, 19 nt, Artificial Sequence
  Synthetic
acaacggccgccuggccac

SEQ ID NO: 8596 - RNA, 22 nt, Artificial Sequence
  Synthetic
uggacaacggccgccuggccac

SEQ ID NO: 8597 - RNA, 23 nt, Artificial Sequence
  Synthetic
cuggacaacggccgccuggccac

SEQ ID NO: 8598 - RNA, 24 nt, Artificial Sequence
  Synthetic
ccuggacaacggccgccuggccac

SEQ ID NO: 8599 - RNA, 18 nt, Artificial Sequence
  Synthetic
uacaguuuaagcgccccc

SEQ ID NO: 8600 - RNA, 21 nt, Artificial Sequence
  Synthetic
acguacaguuuaagcgccccc

SEQ ID NO: 8601 - RNA, 23 nt, Artificial Sequence
  Synthetic
cgacguacaguuuaagcgccccc

SEQ ID NO: 8602 - RNA, 21 nt, Artificial Sequence
  Synthetic
caggcccgagccgcggacgcc

SEQ ID NO: 8603 - RNA, 22 nt, Artificial Sequence
  Synthetic
ccaggcccgagccgcggacgcc

SEQ ID NO: 8604 - RNA, 23 nt, Artificial Sequence
  Synthetic
cccaggcccgagccgcggacgcc

SEQ ID NO: 8605 - RNA, 24 nt, Artificial Sequence
  Synthetic
acccaggcccgagccgcggacgcc

SEQ ID NO: 8606 - RNA, 18 nt, Artificial Sequence
  Synthetic
cgacggggcguugcacgc

SEQ ID NO: 8607 - RNA, 19 nt, Artificial Sequence
  Synthetic
ucgacggggcguugcacgc

SEQ ID NO: 8608 - RNA, 21 nt, Artificial Sequence
  Synthetic
auucgacggggcguugcacgc

SEQ ID NO: 8609 - RNA, 22 nt, Artificial Sequence
  Synthetic
uauucgacggggcguugcacgc

SEQ ID NO: 8610 - RNA, 23 nt, Artificial Sequence
  Synthetic
auauucgacggggcguugcacgc

SEQ ID NO: 8611 - RNA, 24 nt, Artificial Sequence
  Synthetic
cauauucgacggggcguugcacgc

SEQ ID NO: 8612 - RNA, 22 nt, Artificial Sequence
  Synthetic
cgcggggccgcugcugcaccgc

SEQ ID NO: 8613 - RNA, 23 nt, Artificial Sequence
  Synthetic
ucgcggggccgcugcugcaccgc

SEQ ID NO: 8614 - RNA, 24 nt, Artificial Sequence
  Synthetic
cucgcggggccgcugcugcaccgc

SEQ ID NO: 8615 - RNA, 18 nt, Artificial Sequence
  Synthetic
ccaggugccgcggcgcgc

SEQ ID NO: 8616 - RNA, 19 nt, Artificial Sequence
  Synthetic
cccaggugccgcggcgcgc

SEQ ID NO: 8617 - RNA, 21 nt, Artificial Sequence
  Synthetic
cgcccaggugccgcggcgcgc

SEQ ID NO: 8618 - RNA, 23 nt, Artificial Sequence
  Synthetic
ugcgcccaggugccgcggcgcgc

SEQ ID NO: 8619 - RNA, 18 nt, Artificial Sequence
  Synthetic
cagacgacgcgcgugcgc

SEQ ID NO: 8620 - RNA, 19 nt, Artificial Sequence
  Synthetic
ccagacgacgcgcgugcgc

SEQ ID NO: 8621 - RNA, 21 nt, Artificial Sequence
  Synthetic
ccccagacgacgcgcgugcgc

SEQ ID NO: 8622 - RNA, 22 nt, Artificial Sequence
  Synthetic
cccccagacgacgcgcgugcgc

SEQ ID NO: 8623 - RNA, 23 nt, Artificial Sequence
  Synthetic
ccccccagacgacgcgcgugcgc

SEQ ID NO: 8624 - RNA, 18 nt, Artificial Sequence
  Synthetic
ucaagacgggccuccauc

SEQ ID NO: 8625 - RNA, 19 nt, Artificial Sequence
  Synthetic
cucaagacgggccuccauc

SEQ ID NO: 8626 - RNA, 21 nt, Artificial Sequence
  Synthetic
agcucaagacgggccuccauc

SEQ ID NO: 8627 - RNA, 22 nt, Artificial Sequence
  Synthetic
cagcucaagacgggccuccauc

SEQ ID NO: 8628 - RNA, 23 nt, Artificial Sequence
  Synthetic
ucagcucaagacgggccuccauc

SEQ ID NO: 8629 - RNA, 24 nt, Artificial Sequence
  Synthetic
aucagcucaagacgggccuccauc

SEQ ID NO: 8630 - RNA, 19 nt, Artificial Sequence
  Synthetic
cgggcaggcgcaagccgag

SEQ ID NO: 8631 - RNA, 23 nt, Artificial Sequence
  Synthetic
ugggcgggcaggcgcaagccgag

SEQ ID NO: 8632 - RNA, 24 nt, Artificial Sequence
  Synthetic
cugggcgggcaggcgcaagccgag

SEQ ID NO: 8633 - RNA, 18 nt, Artificial Sequence
  Synthetic
uacgcgggggacaaggag

SEQ ID NO: 8634 - RNA, 19 nt, Artificial Sequence
  Synthetic
uuacgcgggggacaaggag

SEQ ID NO: 8635 - RNA, 22 nt, Artificial Sequence
  Synthetic
cguuuacgcgggggacaaggag

SEQ ID NO: 8636 - RNA, 21 nt, Artificial Sequence
  Synthetic
cuggagcgccugaucguggag

SEQ ID NO: 8637 - RNA, 22 nt, Artificial Sequence
  Synthetic
ccuggagcgccugaucguggag

SEQ ID NO: 8638 - RNA, 24 nt, Artificial Sequence
  Synthetic
ugccuggagcgccugaucguggag

SEQ ID NO: 8639 - RNA, 18 nt, Artificial Sequence
  Synthetic
ucgggggagaccuucccg

SEQ ID NO: 8640 - RNA, 19 nt, Artificial Sequence
  Synthetic
cucgggggagaccuucccg

SEQ ID NO: 8641 - RNA, 21 nt, Artificial Sequence
  Synthetic
accucgggggagaccuucccg

SEQ ID NO: 8642 - RNA, 22 nt, Artificial Sequence
  Synthetic
uaccucgggggagaccuucccg

SEQ ID NO: 8643 - RNA, 23 nt, Artificial Sequence
  Synthetic
cuaccucgggggagaccuucccg

SEQ ID NO: 8644 - RNA, 24 nt, Artificial Sequence
  Synthetic
ccuaccucgggggagaccuucccg

SEQ ID NO: 8645 - RNA, 19 nt, Artificial Sequence
  Synthetic
uggcccacgggcggguccg

SEQ ID NO: 8646 - RNA, 21 nt, Artificial Sequence
  Synthetic
ccuggcccacgggcggguccg

SEQ ID NO: 8647 - RNA, 23 nt, Artificial Sequence
  Synthetic
cgccuggcccacgggcggguccg

SEQ ID NO: 8648 - RNA, 18 nt, Artificial Sequence
  Synthetic
cggagaucgcccccggcg

SEQ ID NO: 8649 - RNA, 19 nt, Artificial Sequence
  Synthetic
ccggagaucgcccccggcg

SEQ ID NO: 8650 - RNA, 21 nt, Artificial Sequence
  Synthetic
ucccggagaucgcccccggcg

SEQ ID NO: 8651 - RNA, 24 nt, Artificial Sequence
  Synthetic
uggucccggagaucgcccccggcg

SEQ ID NO: 8652 - RNA, 23 nt, Artificial Sequence
  Synthetic
ugggggcagcgccuggcccacgg

SEQ ID NO: 8653 - RNA, 24 nt, Artificial Sequence
  Synthetic
cugggggcagcgccuggcccacgg

SEQ ID NO: 8654 - RNA, 18 nt, Artificial Sequence
  Synthetic
ccggcacgaaacuggcgg

SEQ ID NO: 8655 - RNA, 19 nt, Artificial Sequence
  Synthetic
cccggcacgaaacuggcgg

SEQ ID NO: 8656 - RNA, 22 nt, Artificial Sequence
  Synthetic
uggcccggcacgaaacuggcgg

SEQ ID NO: 8657 - RNA, 18 nt, Artificial Sequence
  Synthetic
ugaccuacgcgcucaugg

SEQ ID NO: 8658 - RNA, 19 nt, Artificial Sequence
  Synthetic
cugaccuacgcgcucaugg

SEQ ID NO: 8659 - RNA, 21 nt, Artificial Sequence
  Synthetic
cgcugaccuacgcgcucaugg

SEQ ID NO: 8660 - RNA, 23 nt, Artificial Sequence
  Synthetic
cgcgcugaccuacgcgcucaugg

SEQ ID NO: 8661 - RNA, 24 nt, Artificial Sequence
  Synthetic
acgcgcugaccuacgcgcucaugg

SEQ ID NO: 8662 - RNA, 19 nt, Artificial Sequence
  Synthetic
uggaccgccaucgcgacug

SEQ ID NO: 8663 - RNA, 21 nt, Artificial Sequence
  Synthetic
ccuggaccgccaucgcgacug

SEQ ID NO: 8664 - RNA, 22 nt, Artificial Sequence
  Synthetic
cccuggaccgccaucgcgacug

SEQ ID NO: 8665 - RNA, 18 nt, Artificial Sequence
  Synthetic
aaccgccccgcccuuccu

SEQ ID NO: 8666 - RNA, 19 nt, Artificial Sequence
  Synthetic
aaaccgccccgcccuuccu

SEQ ID NO: 8667 - RNA, 21 nt, Artificial Sequence
  Synthetic
auaaaccgccccgcccuuccu

SEQ ID NO: 8668 - RNA, 22 nt, Artificial Sequence
  Synthetic
aauaaaccgccccgcccuuccu

SEQ ID NO: 8669 - RNA, 23 nt, Artificial Sequence
  Synthetic
uaauaaaccgccccgcccuuccu

SEQ ID NO: 8670 - RNA, 18 nt, Artificial Sequence
  Synthetic
cgcccggggccuggagcu

SEQ ID NO: 8671 - RNA, 19 nt, Artificial Sequence
  Synthetic
acgcccggggccuggagcu

SEQ ID NO: 8672 - RNA, 23 nt, Artificial Sequence
  Synthetic
cgggacgcccggggccuggagcu

SEQ ID NO: 8673 - RNA, 24 nt, Artificial Sequence
  Synthetic
ccgggacgcccggggccuggagcu

SEQ ID NO: 8674 - RNA, 18 nt, Artificial Sequence
  Synthetic
cgggccuccaucccgggu

SEQ ID NO: 8675 - RNA, 19 nt, Artificial Sequence
  Synthetic
acgggccuccaucccgggu

SEQ ID NO: 8676 - RNA, 21 nt, Artificial Sequence
  Synthetic
agacgggccuccaucccgggu

SEQ ID NO: 8677 - RNA, 22 nt, Artificial Sequence
  Synthetic
aagacgggccuccaucccgggu

SEQ ID NO: 8678 - RNA, 23 nt, Artificial Sequence
  Synthetic
caagacgggccuccaucccgggu

SEQ ID NO: 8679 - RNA, 24 nt, Artificial Sequence
  Synthetic
ucaagacgggccuccaucccgggu

SEQ ID NO: 8680 - RNA, 18 nt, Artificial Sequence
  Synthetic
cccagcccguccccgugu

SEQ ID NO: 8681 - RNA, 21 nt, Artificial Sequence
  Synthetic
cggcccagcccguccccgugu

SEQ ID NO: 8682 - RNA, 22 nt, Artificial Sequence
  Synthetic
ccggcccagcccguccccgugu

SEQ ID NO: 8683 - RNA, 18 nt, Artificial Sequence
  Synthetic
acggccaggacgccgugu

SEQ ID NO: 8684 - RNA, 19 nt, Artificial Sequence
  Synthetic
cacggccaggacgccgugu

SEQ ID NO: 8685 - RNA, 21 nt, Artificial Sequence
  Synthetic
accacggccaggacgccgugu

SEQ ID NO: 8686 - RNA, 24 nt, Artificial Sequence
  Synthetic
uggaccacggccaggacgccgugu

SEQ ID NO: 8687 - RNA, 18 nt, Artificial Sequence
  Synthetic
cgcguucgacuucuuugu

SEQ ID NO: 8688 - RNA, 19 nt, Artificial Sequence
  Synthetic
ccgcguucgacuucuuugu

SEQ ID NO: 8689 - RNA, 21 nt, Artificial Sequence
  Synthetic
ccccgcguucgacuucuuugu

SEQ ID NO: 8690 - RNA, 22 nt, Artificial Sequence
  Synthetic
accccgcguucgacuucuuugu

SEQ ID NO: 8691 - RNA, 23 nt, Artificial Sequence
  Synthetic
caccccgcguucgacuucuuugu

SEQ ID NO: 8692 - RNA, 18 nt, Artificial Sequence
  Synthetic
cgcagggccggggggaaa

SEQ ID NO: 8693 - RNA, 19 nt, Artificial Sequence
  Synthetic
gcgcagggccggggggaaa

SEQ ID NO: 8694 - RNA, 21 nt, Artificial Sequence
  Synthetic
ucgcgcagggccggggggaaa

SEQ ID NO: 8695 - RNA, 22 nt, Artificial Sequence
  Synthetic
gucgcgcagggccggggggaaa

SEQ ID NO: 8696 - RNA, 23 nt, Artificial Sequence
  Synthetic
ggucgcgcagggccggggggaaa

SEQ ID NO: 8697 - RNA, 24 nt, Artificial Sequence
  Synthetic
aggucgcgcagggccggggggaaa

SEQ ID NO: 8698 - RNA, 18 nt, Artificial Sequence
  Synthetic
ggcguauacgcggucgaa

SEQ ID NO: 8699 - RNA, 19 nt, Artificial Sequence
  Synthetic
uggcguauacgcggucgaa

SEQ ID NO: 8700 - RNA, 21 nt, Artificial Sequence
  Synthetic
gguggcguauacgcggucgaa

SEQ ID NO: 8701 - RNA, 22 nt, Artificial Sequence
  Synthetic
ggguggcguauacgcggucgaa

SEQ ID NO: 8702 - RNA, 23 nt, Artificial Sequence
  Synthetic
aggguggcguauacgcggucgaa

SEQ ID NO: 8703 - RNA, 24 nt, Artificial Sequence
  Synthetic
caggguggcguauacgcggucgaa

SEQ ID NO: 8704 - RNA, 18 nt, Artificial Sequence
  Synthetic
ccugggcgcacccgaaca

SEQ ID NO: 8705 - RNA, 19 nt, Artificial Sequence
  Synthetic
accugggcgcacccgaaca

SEQ ID NO: 8706 - RNA, 21 nt, Artificial Sequence
  Synthetic
gcaccugggcgcacccgaaca

SEQ ID NO: 8707 - RNA, 22 nt, Artificial Sequence
  Synthetic
ggcaccugggcgcacccgaaca

SEQ ID NO: 8708 - RNA, 23 nt, Artificial Sequence
  Synthetic
cggcaccugggcgcacccgaaca

SEQ ID NO: 8709 - RNA, 24 nt, Artificial Sequence
  Synthetic
gcggcaccugggcgcacccgaaca

SEQ ID NO: 8710 - RNA, 18 nt, Artificial Sequence
  Synthetic
acgucggccacccccaca

SEQ ID NO: 8711 - RNA, 19 nt, Artificial Sequence
  Synthetic
cacgucggccacccccaca

SEQ ID NO: 8712 - RNA, 21 nt, Artificial Sequence
  Synthetic
uccacgucggccacccccaca

SEQ ID NO: 8713 - RNA, 22 nt, Artificial Sequence
  Synthetic
cuccacgucggccacccccaca

SEQ ID NO: 8714 - RNA, 23 nt, Artificial Sequence
  Synthetic
gcuccacgucggccacccccaca

SEQ ID NO: 8715 - RNA, 24 nt, Artificial Sequence
  Synthetic
agcuccacgucggccacccccaca

SEQ ID NO: 8716 - RNA, 18 nt, Artificial Sequence
  Synthetic
aguugacgucggucgaca

SEQ ID NO: 8717 - RNA, 19 nt, Artificial Sequence
  Synthetic
uaguugacgucggucgaca

SEQ ID NO: 8718 - RNA, 21 nt, Artificial Sequence
  Synthetic
aguaguugacgucggucgaca

SEQ ID NO: 8719 - RNA, 22 nt, Artificial Sequence
  Synthetic
aaguaguugacgucggucgaca

SEQ ID NO: 8720 - RNA, 23 nt, Artificial Sequence
  Synthetic
gaaguaguugacgucggucgaca

SEQ ID NO: 8721 - RNA, 24 nt, Artificial Sequence
  Synthetic
ggaaguaguugacgucggucgaca

SEQ ID NO: 8722 - RNA, 18 nt, Artificial Sequence
  Synthetic
ccagagccggggggacca

SEQ ID NO: 8723 - RNA, 19 nt, Artificial Sequence
  Synthetic
cccagagccggggggacca

SEQ ID NO: 8724 - RNA, 21 nt, Artificial Sequence
  Synthetic
cccccagagccggggggacca

SEQ ID NO: 8725 - RNA, 22 nt, Artificial Sequence
  Synthetic
gcccccagagccggggggacca

SEQ ID NO: 8726 - RNA, 23 nt, Artificial Sequence
  Synthetic
ggcccccagagccggggggacca

SEQ ID NO: 8727 - RNA, 24 nt, Artificial Sequence
  Synthetic
uggcccccagagccggggggacca

SEQ ID NO: 8728 - RNA, 18 nt, Artificial Sequence
  Synthetic
cuggccuuccgcgaccca

SEQ ID NO: 8729 - RNA, 19 nt, Artificial Sequence
  Synthetic
ucuggccuuccgcgaccca

SEQ ID NO: 8730 - RNA, 21 nt, Artificial Sequence
  Synthetic
caucuggccuuccgcgaccca

SEQ ID NO: 8731 - RNA, 22 nt, Artificial Sequence
  Synthetic
ucaucuggccuuccgcgaccca

SEQ ID NO: 8732 - RNA, 23 nt, Artificial Sequence
  Synthetic
gucaucuggccuuccgcgaccca

SEQ ID NO: 8733 - RNA, 24 nt, Artificial Sequence
  Synthetic
ggucaucuggccuuccgcgaccca

SEQ ID NO: 8734 - RNA, 18 nt, Artificial Sequence
  Synthetic
gcugaugaugcaaggcca

SEQ ID NO: 8735 - RNA, 19 nt, Artificial Sequence
  Synthetic
agcugaugaugcaaggcca

SEQ ID NO: 8736 - RNA, 21 nt, Artificial Sequence
  Synthetic
ugagcugaugaugcaaggcca

SEQ ID NO: 8737 - RNA, 22 nt, Artificial Sequence
  Synthetic
uugagcugaugaugcaaggcca

SEQ ID NO: 8738 - RNA, 23 nt, Artificial Sequence
  Synthetic
cuugagcugaugaugcaaggcca

SEQ ID NO: 8739 - RNA, 24 nt, Artificial Sequence
  Synthetic
ucuugagcugaugaugcaaggcca

SEQ ID NO: 8740 - RNA, 18 nt, Artificial Sequence
  Synthetic
ucagacggggcacggcca

SEQ ID NO: 8741 - RNA, 19 nt, Artificial Sequence
  Synthetic
gucagacggggcacggcca

SEQ ID NO: 8742 - RNA, 21 nt, Artificial Sequence
  Synthetic
gcgucagacggggcacggcca

SEQ ID NO: 8743 - RNA, 22 nt, Artificial Sequence
  Synthetic
ugcgucagacggggcacggcca

SEQ ID NO: 8744 - RNA, 23 nt, Artificial Sequence
  Synthetic
augcgucagacggggcacggcca

SEQ ID NO: 8745 - RNA, 24 nt, Artificial Sequence
  Synthetic
caugcgucagacggggcacggcca

SEQ ID NO: 8746 - RNA, 18 nt, Artificial Sequence
  Synthetic
ccaguagcuggugaugca

SEQ ID NO: 8747 - RNA, 19 nt, Artificial Sequence
  Synthetic
uccaguagcuggugaugca

SEQ ID NO: 8748 - RNA, 21 nt, Artificial Sequence
  Synthetic
guuccaguagcuggugaugca

SEQ ID NO: 8749 - RNA, 22 nt, Artificial Sequence
  Synthetic
uguuccaguagcuggugaugca

SEQ ID NO: 8750 - RNA, 23 nt, Artificial Sequence
  Synthetic
uuguuccaguagcuggugaugca

SEQ ID NO: 8751 - RNA, 24 nt, Artificial Sequence
  Synthetic
guuguuccaguagcuggugaugca

SEQ ID NO: 8752 - RNA, 18 nt, Artificial Sequence
  Synthetic
ccgcgucaacguucauca

SEQ ID NO: 8753 - RNA, 19 nt, Artificial Sequence
  Synthetic
gccgcgucaacguucauca

SEQ ID NO: 8754 - RNA, 21 nt, Artificial Sequence
  Synthetic
ccgccgcgucaacguucauca

SEQ ID NO: 8755 - RNA, 22 nt, Artificial Sequence
  Synthetic
accgccgcgucaacguucauca

SEQ ID NO: 8756 - RNA, 23 nt, Artificial Sequence
  Synthetic
gaccgccgcgucaacguucauca

SEQ ID NO: 8757 - RNA, 24 nt, Artificial Sequence
  Synthetic
cgaccgccgcgucaacguucauca

SEQ ID NO: 8758 - RNA, 18 nt, Artificial Sequence
  Synthetic
gugucggcaugcgucaga

SEQ ID NO: 8759 - RNA, 19 nt, Artificial Sequence
  Synthetic
cgugucggcaugcgucaga

SEQ ID NO: 8760 - RNA, 21 nt, Artificial Sequence
  Synthetic
cgcgugucggcaugcgucaga

SEQ ID NO: 8761 - RNA, 22 nt, Artificial Sequence
  Synthetic
gcgcgugucggcaugcgucaga

SEQ ID NO: 8762 - RNA, 23 nt, Artificial Sequence
  Synthetic
cgcgcgugucggcaugcgucaga

SEQ ID NO: 8763 - RNA, 24 nt, Artificial Sequence
  Synthetic
ccgcgcgugucggcaugcgucaga

SEQ ID NO: 8764 - RNA, 18 nt, Artificial Sequence
  Synthetic
gccgcguuguccaggaga

SEQ ID NO: 8765 - RNA, 19 nt, Artificial Sequence
  Synthetic
ugccgcguuguccaggaga

SEQ ID NO: 8766 - RNA, 21 nt, Artificial Sequence
  Synthetic
gcugccgcguuguccaggaga

SEQ ID NO: 8767 - RNA, 22 nt, Artificial Sequence
  Synthetic
ggcugccgcguuguccaggaga

SEQ ID NO: 8768 - RNA, 23 nt, Artificial Sequence
  Synthetic
cggcugccgcguuguccaggaga

SEQ ID NO: 8769 - RNA, 24 nt, Artificial Sequence
  Synthetic
acggcugccgcguuguccaggaga

SEQ ID NO: 8770 - RNA, 18 nt, Artificial Sequence
  Synthetic
cugccgcguuguccagga

SEQ ID NO: 8771 - RNA, 19 nt, Artificial Sequence
  Synthetic
gcugccgcguuguccagga

SEQ ID NO: 8772 - RNA, 21 nt, Artificial Sequence
  Synthetic
cggcugccgcguuguccagga

SEQ ID NO: 8773 - RNA, 22 nt, Artificial Sequence
  Synthetic
acggcugccgcguuguccagga

SEQ ID NO: 8774 - RNA, 23 nt, Artificial Sequence
  Synthetic
cacggcugccgcguuguccagga

SEQ ID NO: 8775 - RNA, 24 nt, Artificial Sequence
  Synthetic
acacggcugccgcguuguccagga

SEQ ID NO: 8776 - RNA, 18 nt, Artificial Sequence
  Synthetic
aaccguuccaugaccgga

SEQ ID NO: 8777 - RNA, 19 nt, Artificial Sequence
  Synthetic
aaaccguuccaugaccgga

SEQ ID NO: 8778 - RNA, 21 nt, Artificial Sequence
  Synthetic
gcaaaccguuccaugaccgga

SEQ ID NO: 8779 - RNA, 22 nt, Artificial Sequence
  Synthetic
ggcaaaccguuccaugaccgga

SEQ ID NO: 8780 - RNA, 23 nt, Artificial Sequence
  Synthetic
cggcaaaccguuccaugaccgga

SEQ ID NO: 8781 - RNA, 24 nt, Artificial Sequence
  Synthetic
gcggcaaaccguuccaugaccgga

SEQ ID NO: 8782 - RNA, 18 nt, Artificial Sequence
  Synthetic
gugaacccaaacccggga

SEQ ID NO: 8783 - RNA, 19 nt, Artificial Sequence
  Synthetic
ggugaacccaaacccggga

SEQ ID NO: 8784 - RNA, 21 nt, Artificial Sequence
  Synthetic
acggugaacccaaacccggga

SEQ ID NO: 8785 - RNA, 22 nt, Artificial Sequence
  Synthetic
gacggugaacccaaacccggga

SEQ ID NO: 8786 - RNA, 23 nt, Artificial Sequence
  Synthetic
cgacggugaacccaaacccggga

SEQ ID NO: 8787 - RNA, 24 nt, Artificial Sequence
  Synthetic
acgacggugaacccaaacccggga

SEQ ID NO: 8788 - RNA, 18 nt, Artificial Sequence
  Synthetic
cggcgaacagcgcgugga

SEQ ID NO: 8789 - RNA, 19 nt, Artificial Sequence
  Synthetic
ccggcgaacagcgcgugga

SEQ ID NO: 8790 - RNA, 21 nt, Artificial Sequence
  Synthetic
ccccggcgaacagcgcgugga

SEQ ID NO: 8791 - RNA, 22 nt, Artificial Sequence
  Synthetic
gccccggcgaacagcgcgugga

SEQ ID NO: 8792 - RNA, 23 nt, Artificial Sequence
  Synthetic
ggccccggcgaacagcgcgugga

SEQ ID NO: 8793 - RNA, 24 nt, Artificial Sequence
  Synthetic
cggccccggcgaacagcgcgugga

SEQ ID NO: 8794 - RNA, 18 nt, Artificial Sequence
  Synthetic
acagagccagucccuuga

SEQ ID NO: 8795 - RNA, 19 nt, Artificial Sequence
  Synthetic
uacagagccagucccuuga

SEQ ID NO: 8796 - RNA, 21 nt, Artificial Sequence
  Synthetic
auuacagagccagucccuuga

SEQ ID NO: 8797 - RNA, 22 nt, Artificial Sequence
  Synthetic
uauuacagagccagucccuuga

SEQ ID NO: 8798 - RNA, 23 nt, Artificial Sequence
  Synthetic
uuauuacagagccagucccuuga

SEQ ID NO: 8799 - RNA, 24 nt, Artificial Sequence
  Synthetic
uuuauuacagagccagucccuuga

SEQ ID NO: 8800 - RNA, 18 nt, Artificial Sequence
  Synthetic
gcaggaggcgcuguuuga

SEQ ID NO: 8801 - RNA, 19 nt, Artificial Sequence
  Synthetic
ugcaggaggcgcuguuuga

SEQ ID NO: 8802 - RNA, 21 nt, Artificial Sequence
  Synthetic
acugcaggaggcgcuguuuga

SEQ ID NO: 8803 - RNA, 22 nt, Artificial Sequence
  Synthetic
gacugcaggaggcgcuguuuga

SEQ ID NO: 8804 - RNA, 23 nt, Artificial Sequence
  Synthetic
ggacugcaggaggcgcuguuuga

SEQ ID NO: 8805 - RNA, 24 nt, Artificial Sequence
  Synthetic
aggacugcaggaggcgcuguuuga

SEQ ID NO: 8806 - RNA, 18 nt, Artificial Sequence
  Synthetic
gcgaugucggccgacgua

SEQ ID NO: 8807 - RNA, 19 nt, Artificial Sequence
  Synthetic
ggcgaugucggccgacgua

SEQ ID NO: 8808 - RNA, 21 nt, Artificial Sequence
  Synthetic
gcggcgaugucggccgacgua

SEQ ID NO: 8809 - RNA, 22 nt, Artificial Sequence
  Synthetic
ggcggcgaugucggccgacgua

SEQ ID NO: 8810 - RNA, 23 nt, Artificial Sequence
  Synthetic
uggcggcgaugucggccgacgua

SEQ ID NO: 8811 - RNA, 24 nt, Artificial Sequence
  Synthetic
uuggcggcgaugucggccgacgua

SEQ ID NO: 8812 - RNA, 18 nt, Artificial Sequence
  Synthetic
ggcgcccaccagggggua

SEQ ID NO: 8813 - RNA, 19 nt, Artificial Sequence
  Synthetic
uggcgcccaccagggggua

SEQ ID NO: 8814 - RNA, 21 nt, Artificial Sequence
  Synthetic
cauggcgcccaccagggggua

SEQ ID NO: 8815 - RNA, 22 nt, Artificial Sequence
  Synthetic
ccauggcgcccaccagggggua

SEQ ID NO: 8816 - RNA, 23 nt, Artificial Sequence
  Synthetic
uccauggcgcccaccagggggua

SEQ ID NO: 8817 - RNA, 24 nt, Artificial Sequence
  Synthetic
guccauggcgcccaccagggggua

SEQ ID NO: 8818 - RNA, 18 nt, Artificial Sequence
  Synthetic
gggcggggcgguuuauua

SEQ ID NO: 8819 - RNA, 19 nt, Artificial Sequence
  Synthetic
agggcggggcgguuuauua

SEQ ID NO: 8820 - RNA, 20 nt, Artificial Sequence
  Synthetic
aagggcggggcgguuuauua

SEQ ID NO: 8821 - RNA, 21 nt, Artificial Sequence
  Synthetic
gaagggcggggcgguuuauua

SEQ ID NO: 8822 - RNA, 22 nt, Artificial Sequence
  Synthetic
ggaagggcggggcgguuuauua

SEQ ID NO: 8823 - RNA, 23 nt, Artificial Sequence
  Synthetic
aggaagggcggggcgguuuauua

SEQ ID NO: 8824 - RNA, 24 nt, Artificial Sequence
  Synthetic
aaggaagggcggggcgguuuauua

SEQ ID NO: 8825 - RNA, 18 nt, Artificial Sequence
  Synthetic
aggugguaggccccguua

SEQ ID NO: 8826 - RNA, 19 nt, Artificial Sequence
  Synthetic
gaggugguaggccccguua

SEQ ID NO: 8827 - RNA, 21 nt, Artificial Sequence
  Synthetic
uugaggugguaggccccguua

SEQ ID NO: 8828 - RNA, 22 nt, Artificial Sequence
  Synthetic
guugaggugguaggccccguua

SEQ ID NO: 8829 - RNA, 23 nt, Artificial Sequence
  Synthetic
cguugaggugguaggccccguua

SEQ ID NO: 8830 - RNA, 24 nt, Artificial Sequence
  Synthetic
ccguugaggugguaggccccguua

SEQ ID NO: 8831 - RNA, 18 nt, Artificial Sequence
  Synthetic
acgacggugaacccaaac

SEQ ID NO: 8832 - RNA, 19 nt, Artificial Sequence
  Synthetic
gacgacggugaacccaaac

SEQ ID NO: 8833 - RNA, 21 nt, Artificial Sequence
  Synthetic
cggacgacggugaacccaaac

SEQ ID NO: 8834 - RNA, 22 nt, Artificial Sequence
  Synthetic
ucggacgacggugaacccaaac

SEQ ID NO: 8835 - RNA, 23 nt, Artificial Sequence
  Synthetic
gucggacgacggugaacccaaac

SEQ ID NO: 8836 - RNA, 24 nt, Artificial Sequence
  Synthetic
ugucggacgacggugaacccaaac

SEQ ID NO: 8837 - RNA, 18 nt, Artificial Sequence
  Synthetic
accugggcgcacccgaac

SEQ ID NO: 8838 - RNA, 19 nt, Artificial Sequence
  Synthetic
caccugggcgcacccgaac

SEQ ID NO: 8839 - RNA, 21 nt, Artificial Sequence
  Synthetic
ggcaccugggcgcacccgaac

SEQ ID NO: 8840 - RNA, 22 nt, Artificial Sequence
  Synthetic
cggcaccugggcgcacccgaac

SEQ ID NO: 8841 - RNA, 23 nt, Artificial Sequence
  Synthetic
gcggcaccugggcgcacccgaac

SEQ ID NO: 8842 - RNA, 24 nt, Artificial Sequence
  Synthetic
cgcggcaccugggcgcacccgaac

SEQ ID NO: 8843 - RNA, 18 nt, Artificial Sequence
  Synthetic
cccacaaagaagucgaac

SEQ ID NO: 8844 - RNA, 19 nt, Artificial Sequence
  Synthetic
ccccacaaagaagucgaac

SEQ ID NO: 8845 - RNA, 21 nt, Artificial Sequence
  Synthetic
acccccacaaagaagucgaac

SEQ ID NO: 8846 - RNA, 22 nt, Artificial Sequence
  Synthetic
cacccccacaaagaagucgaac

SEQ ID NO: 8847 - RNA, 23 nt, Artificial Sequence
  Synthetic
ccacccccacaaagaagucgaac

SEQ ID NO: 8848 - RNA, 24 nt, Artificial Sequence
  Synthetic
gccacccccacaaagaagucgaac

SEQ ID NO: 8849 - RNA, 18 nt, Artificial Sequence
  Synthetic
cugggcgcacccgaacac

SEQ ID NO: 8850 - RNA, 19 nt, Artificial Sequence
  Synthetic
ccugggcgcacccgaacac

SEQ ID NO: 8851 - RNA, 21 nt, Artificial Sequence
  Synthetic
caccugggcgcacccgaacac

SEQ ID NO: 8852 - RNA, 22 nt, Artificial Sequence
  Synthetic
gcaccugggcgcacccgaacac

SEQ ID NO: 8853 - RNA, 23 nt, Artificial Sequence
  Synthetic
ggcaccugggcgcacccgaacac

SEQ ID NO: 8854 - RNA, 24 nt, Artificial Sequence
  Synthetic
cggcaccugggcgcacccgaacac

SEQ ID NO: 8855 - RNA, 18 nt, Artificial Sequence
  Synthetic
ggcgucacagucccacac

SEQ ID NO: 8856 - RNA, 19 nt, Artificial Sequence
  Synthetic
gggcgucacagucccacac

SEQ ID NO: 8857 - RNA, 21 nt, Artificial Sequence
  Synthetic
cagggcgucacagucccacac

SEQ ID NO: 8858 - RNA, 22 nt, Artificial Sequence
  Synthetic
ucagggcgucacagucccacac

SEQ ID NO: 8859 - RNA, 23 nt, Artificial Sequence
  Synthetic
aucagggcgucacagucccacac

SEQ ID NO: 8860 - RNA, 24 nt, Artificial Sequence
  Synthetic
caucagggcgucacagucccacac

SEQ ID NO: 8861 - RNA, 18 nt, Artificial Sequence
  Synthetic
cagguccauggcgcccac

SEQ ID NO: 8862 - RNA, 19 nt, Artificial Sequence
  Synthetic
ucagguccauggcgcccac

SEQ ID NO: 8863 - RNA, 21 nt, Artificial Sequence
  Synthetic
cgucagguccauggcgcccac

SEQ ID NO: 8864 - RNA, 22 nt, Artificial Sequence
  Synthetic
acgucagguccauggcgcccac

SEQ ID NO: 8865 - RNA, 23 nt, Artificial Sequence
  Synthetic
aacgucagguccauggcgcccac

SEQ ID NO: 8866 - RNA, 24 nt, Artificial Sequence
  Synthetic
gaacgucagguccauggcgcccac

SEQ ID NO: 8867 - RNA, 18 nt, Artificial Sequence
  Synthetic
agggcgucacagucccac

SEQ ID NO: 8868 - RNA, 19 nt, Artificial Sequence
  Synthetic
cagggcgucacagucccac

SEQ ID NO: 8869 - RNA, 21 nt, Artificial Sequence
  Synthetic
aucagggcgucacagucccac

SEQ ID NO: 8870 - RNA, 22 nt, Artificial Sequence
  Synthetic
caucagggcgucacagucccac

SEQ ID NO: 8871 - RNA, 23 nt, Artificial Sequence
  Synthetic
gcaucagggcgucacagucccac

SEQ ID NO: 8872 - RNA, 24 nt, Artificial Sequence
  Synthetic
cgcaucagggcgucacagucccac

SEQ ID NO: 8873 - RNA, 18 nt, Artificial Sequence
  Synthetic
aguuucgugccgggccac

SEQ ID NO: 8874 - RNA, 19 nt, Artificial Sequence
  Synthetic
caguuucgugccgggccac

SEQ ID NO: 8875 - RNA, 21 nt, Artificial Sequence
  Synthetic
gccaguuucgugccgggccac

SEQ ID NO: 8876 - RNA, 22 nt, Artificial Sequence
  Synthetic
cgccaguuucgugccgggccac

SEQ ID NO: 8877 - RNA, 23 nt, Artificial Sequence
  Synthetic
ccgccaguuucgugccgggccac

SEQ ID NO: 8878 - RNA, 24 nt, Artificial Sequence
  Synthetic
cccgccaguuucgugccgggccac

SEQ ID NO: 8879 - RNA, 18 nt, Artificial Sequence
  Synthetic
cgcggcaccugggcgcac

SEQ ID NO: 8880 - RNA, 19 nt, Artificial Sequence
  Synthetic
ccgcggcaccugggcgcac

SEQ ID NO: 8881 - RNA, 21 nt, Artificial Sequence
  Synthetic
cgccgcggcaccugggcgcac

SEQ ID NO: 8882 - RNA, 22 nt, Artificial Sequence
  Synthetic
gcgccgcggcaccugggcgcac

SEQ ID NO: 8883 - RNA, 23 nt, Artificial Sequence
  Synthetic
cgcgccgcggcaccugggcgcac

SEQ ID NO: 8884 - RNA, 24 nt, Artificial Sequence
  Synthetic
gcgcgccgcggcaccugggcgcac

SEQ ID NO: 8885 - RNA, 18 nt, Artificial Sequence
  Synthetic
cccugcgcgccgcggcac

SEQ ID NO: 8886 - RNA, 19 nt, Artificial Sequence
  Synthetic
ucccugcgcgccgcggcac

SEQ ID NO: 8887 - RNA, 21 nt, Artificial Sequence
  Synthetic
caucccugcgcgccgcggcac

SEQ ID NO: 8888 - RNA, 22 nt, Artificial Sequence
  Synthetic
ccaucccugcgcgccgcggcac

SEQ ID NO: 8889 - RNA, 23 nt, Artificial Sequence
  Synthetic
uccaucccugcgcgccgcggcac

SEQ ID NO: 8890 - RNA, 24 nt, Artificial Sequence
  Synthetic
guccaucccugcgcgccgcggcac

SEQ ID NO: 8891 - RNA, 18 nt, Artificial Sequence
  Synthetic
uaguugacgucggucgac

SEQ ID NO: 8892 - RNA, 19 nt, Artificial Sequence
  Synthetic
guaguugacgucggucgac

SEQ ID NO: 8893 - RNA, 21 nt, Artificial Sequence
  Synthetic
aaguaguugacgucggucgac

SEQ ID NO: 8894 - RNA, 22 nt, Artificial Sequence
  Synthetic
gaaguaguugacgucggucgac

SEQ ID NO: 8895 - RNA, 23 nt, Artificial Sequence
  Synthetic
ggaaguaguugacgucggucgac

SEQ ID NO: 8896 - RNA, 24 nt, Artificial Sequence
  Synthetic
cggaaguaguugacgucggucgac

SEQ ID NO: 8897 - RNA, 18 nt, Artificial Sequence
  Synthetic
ccccagagccggggggac

SEQ ID NO: 8898 - RNA, 19 nt, Artificial Sequence
  Synthetic
cccccagagccggggggac

SEQ ID NO: 8899 - RNA, 21 nt, Artificial Sequence
  Synthetic
ggcccccagagccggggggac

SEQ ID NO: 8900 - RNA, 22 nt, Artificial Sequence
  Synthetic
uggcccccagagccggggggac

SEQ ID NO: 8901 - RNA, 23 nt, Artificial Sequence
  Synthetic
uuggcccccagagccggggggac

SEQ ID NO: 8902 - RNA, 24 nt, Artificial Sequence
  Synthetic
guuggcccccagagccggggggac

SEQ ID NO: 8903 - RNA, 18 nt, Artificial Sequence
  Synthetic
ggcgaacagcgcguggac

SEQ ID NO: 8904 - RNA, 19 nt, Artificial Sequence
  Synthetic
cggcgaacagcgcguggac

SEQ ID NO: 8905 - RNA, 21 nt, Artificial Sequence
  Synthetic
cccggcgaacagcgcguggac

SEQ ID NO: 8906 - RNA, 22 nt, Artificial Sequence
  Synthetic
ccccggcgaacagcgcguggac

SEQ ID NO: 8907 - RNA, 23 nt, Artificial Sequence
  Synthetic
gccccggcgaacagcgcguggac

SEQ ID NO: 8908 - RNA, 24 nt, Artificial Sequence
  Synthetic
ggccccggcgaacagcgcguggac

SEQ ID NO: 8909 - RNA, 18 nt, Artificial Sequence
  Synthetic
uuacaugccgccgcguac

SEQ ID NO: 8910 - RNA, 19 nt, Artificial Sequence
  Synthetic
guuacaugccgccgcguac

SEQ ID NO: 8911 - RNA, 21 nt, Artificial Sequence
  Synthetic
acguuacaugccgccgcguac

SEQ ID NO: 8912 - RNA, 22 nt, Artificial Sequence
  Synthetic
cacguuacaugccgccgcguac

SEQ ID NO: 8913 - RNA, 23 nt, Artificial Sequence
  Synthetic
ccacguuacaugccgccgcguac

SEQ ID NO: 8914 - RNA, 24 nt, Artificial Sequence
  Synthetic
gccacguuacaugccgccgcguac

SEQ ID NO: 8915 - RNA, 18 nt, Artificial Sequence
  Synthetic
cucuggccguggucguac

SEQ ID NO: 8916 - RNA, 19 nt, Artificial Sequence
  Synthetic
gcucuggccguggucguac

SEQ ID NO: 8917 - RNA, 21 nt, Artificial Sequence
  Synthetic
ucgcucuggccguggucguac

SEQ ID NO: 8918 - RNA, 22 nt, Artificial Sequence
  Synthetic
gucgcucuggccguggucguac

SEQ ID NO: 8919 - RNA, 23 nt, Artificial Sequence
  Synthetic
ggucgcucuggccguggucguac

SEQ ID NO: 8920 - RNA, 24 nt, Artificial Sequence
  Synthetic
gggucgcucuggccguggucguac

SEQ ID NO: 8921 - RNA, 18 nt, Artificial Sequence
  Synthetic
agguccauggcgcccacc

SEQ ID NO: 8922 - RNA, 19 nt, Artificial Sequence
  Synthetic
cagguccauggcgcccacc

SEQ ID NO: 8923 - RNA, 21 nt, Artificial Sequence
  Synthetic
gucagguccauggcgcccacc

SEQ ID NO: 8924 - RNA, 22 nt, Artificial Sequence
  Synthetic
cgucagguccauggcgcccacc

SEQ ID NO: 8925 - RNA, 23 nt, Artificial Sequence
  Synthetic
acgucagguccauggcgcccacc

SEQ ID NO: 8926 - RNA, 24 nt, Artificial Sequence
  Synthetic
aacgucagguccauggcgcccacc

SEQ ID NO: 8927 - RNA, 18 nt, Artificial Sequence
  Synthetic
guuucgugccgggccacc

SEQ ID NO: 8928 - RNA, 19 nt, Artificial Sequence
  Synthetic
aguuucgugccgggccacc

SEQ ID NO: 8929 - RNA, 21 nt, Artificial Sequence
  Synthetic
ccaguuucgugccgggccacc

SEQ ID NO: 8930 - RNA, 22 nt, Artificial Sequence
  Synthetic
gccaguuucgugccgggccacc

SEQ ID NO: 8931 - RNA, 23 nt, Artificial Sequence
  Synthetic
cgccaguuucgugccgggccacc

SEQ ID NO: 8932 - RNA, 24 nt, Artificial Sequence
  Synthetic
ccgccaguuucgugccgggccacc

SEQ ID NO: 8933 - RNA, 18 nt, Artificial Sequence
  Synthetic
ccacgaguucgcggcacc

SEQ ID NO: 8934 - RNA, 19 nt, Artificial Sequence
  Synthetic
uccacgaguucgcggcacc

SEQ ID NO: 8935 - RNA, 21 nt, Artificial Sequence
  Synthetic
ccuccacgaguucgcggcacc

SEQ ID NO: 8936 - RNA, 22 nt, Artificial Sequence
  Synthetic
uccuccacgaguucgcggcacc

SEQ ID NO: 8937 - RNA, 23 nt, Artificial Sequence
  Synthetic
guccuccacgaguucgcggcacc

SEQ ID NO: 8938 - RNA, 24 nt, Artificial Sequence
  Synthetic
gguccuccacgaguucgcggcacc

SEQ ID NO: 8939 - RNA, 18 nt, Artificial Sequence
  Synthetic
cccagagccggggggacc

SEQ ID NO: 8940 - RNA, 19 nt, Artificial Sequence
  Synthetic
ccccagagccggggggacc

SEQ ID NO: 8941 - RNA, 21 nt, Artificial Sequence
  Synthetic
gcccccagagccggggggacc

SEQ ID NO: 8942 - RNA, 22 nt, Artificial Sequence
  Synthetic
ggcccccagagccggggggacc

SEQ ID NO: 8943 - RNA, 23 nt, Artificial Sequence
  Synthetic
uggcccccagagccggggggacc

SEQ ID NO: 8944 - RNA, 24 nt, Artificial Sequence
  Synthetic
uuggcccccagagccggggggacc

SEQ ID NO: 8945 - RNA, 18 nt, Artificial Sequence
  Synthetic
cuggugaugcacuggacc

SEQ ID NO: 8946 - RNA, 19 nt, Artificial Sequence
  Synthetic
gcuggugaugcacuggacc

SEQ ID NO: 8947 - RNA, 21 nt, Artificial Sequence
  Synthetic
uagcuggugaugcacuggacc

SEQ ID NO: 8948 - RNA, 22 nt, Artificial Sequence
  Synthetic
guagcuggugaugcacuggacc

SEQ ID NO: 8949 - RNA, 23 nt, Artificial Sequence
  Synthetic
aguagcuggugaugcacuggacc

SEQ ID NO: 8950 - RNA, 24 nt, Artificial Sequence
  Synthetic
caguagcuggugaugcacuggacc

SEQ ID NO: 8951 - RNA, 18 nt, Artificial Sequence
  Synthetic
cacgaguucgcggcaccc

SEQ ID NO: 8952 - RNA, 19 nt, Artificial Sequence
  Synthetic
ccacgaguucgcggcaccc

SEQ ID NO: 8953 - RNA, 21 nt, Artificial Sequence
  Synthetic
cuccacgaguucgcggcaccc

SEQ ID NO: 8954 - RNA, 22 nt, Artificial Sequence
  Synthetic
ccuccacgaguucgcggcaccc

SEQ ID NO: 8955 - RNA, 23 nt, Artificial Sequence
  Synthetic
uccuccacgaguucgcggcaccc

SEQ ID NO: 8956 - RNA, 24 nt, Artificial Sequence
  Synthetic
guccuccacgaguucgcggcaccc

SEQ ID NO: 8957 - RNA, 18 nt, Artificial Sequence
  Synthetic
acgaguucgcggcacccc

SEQ ID NO: 8958 - RNA, 19 nt, Artificial Sequence
  Synthetic
cacgaguucgcggcacccc

SEQ ID NO: 8959 - RNA, 21 nt, Artificial Sequence
  Synthetic
uccacgaguucgcggcacccc

SEQ ID NO: 8960 - RNA, 22 nt, Artificial Sequence
  Synthetic
cuccacgaguucgcggcacccc

SEQ ID NO: 8961 - RNA, 23 nt, Artificial Sequence
  Synthetic
ccuccacgaguucgcggcacccc

SEQ ID NO: 8962 - RNA, 24 nt, Artificial Sequence
  Synthetic
uccuccacgaguucgcggcacccc

SEQ ID NO: 8963 - RNA, 18 nt, Artificial Sequence
  Synthetic
gccgcgcucaaacgcccc

SEQ ID NO: 8964 - RNA, 19 nt, Artificial Sequence
  Synthetic
ugccgcgcucaaacgcccc

SEQ ID NO: 8965 - RNA, 21 nt, Artificial Sequence
  Synthetic
cgugccgcgcucaaacgcccc

SEQ ID NO: 8966 - RNA, 22 nt, Artificial Sequence
  Synthetic
ccgugccgcgcucaaacgcccc

SEQ ID NO: 8967 - RNA, 23 nt, Artificial Sequence
  Synthetic
gccgugccgcgcucaaacgcccc

SEQ ID NO: 8968 - RNA, 24 nt, Artificial Sequence
  Synthetic
ggccgugccgcgcucaaacgcccc

SEQ ID NO: 8969 - RNA, 18 nt, Artificial Sequence
  Synthetic
gcggucgucgaacgcccc

SEQ ID NO: 8970 - RNA, 19 nt, Artificial Sequence
  Synthetic
ugcggucgucgaacgcccc

SEQ ID NO: 8971 - RNA, 21 nt, Artificial Sequence
  Synthetic
guugcggucgucgaacgcccc

SEQ ID NO: 8972 - RNA, 22 nt, Artificial Sequence
  Synthetic
aguugcggucgucgaacgcccc

SEQ ID NO: 8973 - RNA, 23 nt, Artificial Sequence
  Synthetic
uaguugcggucgucgaacgcccc

SEQ ID NO: 8974 - RNA, 24 nt, Artificial Sequence
  Synthetic
guaguugcggucgucgaacgcccc

SEQ ID NO: 8975 - RNA, 18 nt, Artificial Sequence
  Synthetic
cggugcagcagcggcccc

SEQ ID NO: 8976 - RNA, 19 nt, Artificial Sequence
  Synthetic
gcggugcagcagcggcccc

SEQ ID NO: 8977 - RNA, 21 nt, Artificial Sequence
  Synthetic
ccgcggugcagcagcggcccc

SEQ ID NO: 8978 - RNA, 22 nt, Artificial Sequence
  Synthetic
cccgcggugcagcagcggcccc

SEQ ID NO: 8979 - RNA, 23 nt, Artificial Sequence
  Synthetic
ccccgcggugcagcagcggcccc

SEQ ID NO: 8980 - RNA, 24 nt, Artificial Sequence
  Synthetic
cccccgcggugcagcagcggcccc

SEQ ID NO: 8981 - RNA, 18 nt, Artificial Sequence
  Synthetic
cgaaaaguaguuggcccc

SEQ ID NO: 8982 - RNA, 19 nt, Artificial Sequence
  Synthetic
acgaaaaguaguuggcccc

SEQ ID NO: 8983 - RNA, 21 nt, Artificial Sequence
  Synthetic
cgacgaaaaguaguuggcccc

SEQ ID NO: 8984 - RNA, 22 nt, Artificial Sequence
  Synthetic
ucgacgaaaaguaguuggcccc

SEQ ID NO: 8985 - RNA, 23 nt, Artificial Sequence
  Synthetic
aucgacgaaaaguaguuggcccc

SEQ ID NO: 8986 - RNA, 24 nt, Artificial Sequence
  Synthetic
gaucgacgaaaaguaguuggcccc

SEQ ID NO: 8987 - RNA, 18 nt, Artificial Sequence
  Synthetic
gacccaucggacccgccc

SEQ ID NO: 8988 - RNA, 19 nt, Artificial Sequence
  Synthetic
cgacccaucggacccgccc

SEQ ID NO: 8989 - RNA, 21 nt, Artificial Sequence
  Synthetic
cgcgacccaucggacccgccc

SEQ ID NO: 8990 - RNA, 22 nt, Artificial Sequence
  Synthetic
ccgcgacccaucggacccgccc

SEQ ID NO: 8991 - RNA, 23 nt, Artificial Sequence
  Synthetic
uccgcgacccaucggacccgccc

SEQ ID NO: 8992 - RNA, 24 nt, Artificial Sequence
  Synthetic
uuccgcgacccaucggacccgccc

SEQ ID NO: 8993 - RNA, 18 nt, Artificial Sequence
  Synthetic
accggauugaacaggccc

SEQ ID NO: 8994 - RNA, 19 nt, Artificial Sequence
  Synthetic
gaccggauugaacaggccc

SEQ ID NO: 8995 - RNA, 21 nt, Artificial Sequence
  Synthetic
augaccggauugaacaggccc

SEQ ID NO: 8996 - RNA, 22 nt, Artificial Sequence
  Synthetic
caugaccggauugaacaggccc

SEQ ID NO: 8997 - RNA, 23 nt, Artificial Sequence
  Synthetic
ccaugaccggauugaacaggccc

SEQ ID NO: 8998 - RNA, 24 nt, Artificial Sequence
  Synthetic
uccaugaccggauugaacaggccc

SEQ ID NO: 8999 - RNA, 18 nt, Artificial Sequence
  Synthetic
gccaccuggagcuggccc

SEQ ID NO: 9000 - RNA, 19 nt, Artificial Sequence
  Synthetic
ggccaccuggagcuggccc

SEQ ID NO: 9001 - RNA, 21 nt, Artificial Sequence
  Synthetic
cgggccaccuggagcuggccc

SEQ ID NO: 9002 - RNA, 22 nt, Artificial Sequence
  Synthetic
ccgggccaccuggagcuggccc

SEQ ID NO: 9003 - RNA, 23 nt, Artificial Sequence
  Synthetic
gccgggccaccuggagcuggccc

SEQ ID NO: 9004 - RNA, 24 nt, Artificial Sequence
  Synthetic
ugccgggccaccuggagcuggccc

SEQ ID NO: 9005 - RNA, 18 nt, Artificial Sequence
  Synthetic
cgguggcccgccuugccc

SEQ ID NO: 9006 - RNA, 19 nt, Artificial Sequence
  Synthetic
gcgguggcccgccuugccc

SEQ ID NO: 9007 - RNA, 21 nt, Artificial Sequence
  Synthetic
cggcgguggcccgccuugccc

SEQ ID NO: 9008 - RNA, 22 nt, Artificial Sequence
  Synthetic
ccggcgguggcccgccuugccc

SEQ ID NO: 9009 - RNA, 23 nt, Artificial Sequence
  Synthetic
cccggcgguggcccgccuugccc

SEQ ID NO: 9010 - RNA, 24 nt, Artificial Sequence
  Synthetic
ucccggcgguggcccgccuugccc

SEQ ID NO: 9011 - RNA, 18 nt, Artificial Sequence
  Synthetic
agguggccuggaucuccc

SEQ ID NO: 9012 - RNA, 19 nt, Artificial Sequence
  Synthetic
cagguggccuggaucuccc

SEQ ID NO: 9013 - RNA, 21 nt, Artificial Sequence
  Synthetic
gccagguggccuggaucuccc

SEQ ID NO: 9014 - RNA, 22 nt, Artificial Sequence
  Synthetic
cgccagguggccuggaucuccc

SEQ ID NO: 9015 - RNA, 23 nt, Artificial Sequence
  Synthetic
gcgccagguggccuggaucuccc

SEQ ID NO: 9016 - RNA, 24 nt, Artificial Sequence
  Synthetic
cgcgccagguggccuggaucuccc

SEQ ID NO: 9017 - RNA, 18 nt, Artificial Sequence
  Synthetic
uccucgggaaggucuccc

SEQ ID NO: 9018 - RNA, 19 nt, Artificial Sequence
  Synthetic
cuccucgggaaggucuccc

SEQ ID NO: 9019 - RNA, 21 nt, Artificial Sequence
  Synthetic
cacuccucgggaaggucuccc

SEQ ID NO: 9020 - RNA, 22 nt, Artificial Sequence
  Synthetic
gcacuccucgggaaggucuccc

SEQ ID NO: 9021 - RNA, 23 nt, Artificial Sequence
  Synthetic
ugcacuccucgggaaggucuccc

SEQ ID NO: 9022 - RNA, 24 nt, Artificial Sequence
  Synthetic
augcacuccucgggaaggucuccc

SEQ ID NO: 9023 - RNA, 18 nt, Artificial Sequence
  Synthetic
uauuacagagccaguccc

SEQ ID NO: 9024 - RNA, 19 nt, Artificial Sequence
  Synthetic
uuauuacagagccaguccc

SEQ ID NO: 9025 - RNA, 20 nt, Artificial Sequence
  Synthetic
uuuauuacagagccaguccc

SEQ ID NO: 9026 - RNA, 21 nt, Artificial Sequence
  Synthetic
guuuauuacagagccaguccc

SEQ ID NO: 9027 - RNA, 22 nt, Artificial Sequence
  Synthetic
gguuuauuacagagccaguccc

SEQ ID NO: 9028 - RNA, 23 nt, Artificial Sequence
  Synthetic
cgguuuauuacagagccaguccc

SEQ ID NO: 9029 - RNA, 24 nt, Artificial Sequence
  Synthetic
gcgguuuauuacagagccaguccc

SEQ ID NO: 9030 - RNA, 18 nt, Artificial Sequence
  Synthetic
cccccggcggcgcguccc

SEQ ID NO: 9031 - RNA, 19 nt, Artificial Sequence
  Synthetic
gcccccggcggcgcguccc

SEQ ID NO: 9032 - RNA, 21 nt, Artificial Sequence
  Synthetic
acgcccccggcggcgcguccc

SEQ ID NO: 9033 - RNA, 22 nt, Artificial Sequence
  Synthetic
aacgcccccggcggcgcguccc

SEQ ID NO: 9034 - RNA, 23 nt, Artificial Sequence
  Synthetic
aaacgcccccggcggcgcguccc

SEQ ID NO: 9035 - RNA, 24 nt, Artificial Sequence
  Synthetic
uaaacgcccccggcggcgcguccc

SEQ ID NO: 9036 - RNA, 18 nt, Artificial Sequence
  Synthetic
aucggcaacaacaaagcc

SEQ ID NO: 9037 - RNA, 19 nt, Artificial Sequence
  Synthetic
caucggcaacaacaaagcc

SEQ ID NO: 9038 - RNA, 21 nt, Artificial Sequence
  Synthetic
ugcaucggcaacaacaaagcc

SEQ ID NO: 9039 - RNA, 22 nt, Artificial Sequence
  Synthetic
uugcaucggcaacaacaaagcc

SEQ ID NO: 9040 - RNA, 23 nt, Artificial Sequence
  Synthetic
guugcaucggcaacaacaaagcc

SEQ ID NO: 9041 - RNA, 24 nt, Artificial Sequence
  Synthetic
cguugcaucggcaacaacaaagcc

SEQ ID NO: 9042 - RNA, 18 nt, Artificial Sequence
  Synthetic
uaguuggcccccagagcc

SEQ ID NO: 9043 - RNA, 19 nt, Artificial Sequence
  Synthetic
guaguuggcccccagagcc

SEQ ID NO: 9044 - RNA, 21 nt, Artificial Sequence
  Synthetic
aaguaguuggcccccagagcc

SEQ ID NO: 9045 - RNA, 22 nt, Artificial Sequence
  Synthetic
aaaguaguuggcccccagagcc

SEQ ID NO: 9046 - RNA, 23 nt, Artificial Sequence
  Synthetic
aaaaguaguuggcccccagagcc

SEQ ID NO: 9047 - RNA, 24 nt, Artificial Sequence
  Synthetic
gaaaaguaguuggcccccagagcc

SEQ ID NO: 9048 - RNA, 18 nt, Artificial Sequence
  Synthetic
gugccgcgcucaaacgcc

SEQ ID NO: 9049 - RNA, 19 nt, Artificial Sequence
  Synthetic
cgugccgcgcucaaacgcc

SEQ ID NO: 9050 - RNA, 21 nt, Artificial Sequence
  Synthetic
gccgugccgcgcucaaacgcc

SEQ ID NO: 9051 - RNA, 22 nt, Artificial Sequence
  Synthetic
ggccgugccgcgcucaaacgcc

SEQ ID NO: 9052 - RNA, 23 nt, Artificial Sequence
  Synthetic
cggccgugccgcgcucaaacgcc

SEQ ID NO: 9053 - RNA, 24 nt, Artificial Sequence
  Synthetic
ucggccgugccgcgcucaaacgcc

SEQ ID NO: 9054 - RNA, 18 nt, Artificial Sequence
  Synthetic
aucuugaaguaccccgcc

SEQ ID NO: 9055 - RNA, 19 nt, Artificial Sequence
  Synthetic
gaucuugaaguaccccgcc

SEQ ID NO: 9056 - RNA, 21 nt, Artificial Sequence
  Synthetic
cugaucuugaaguaccccgcc

SEQ ID NO: 9057 - RNA, 22 nt, Artificial Sequence
  Synthetic
acugaucuugaaguaccccgcc

SEQ ID NO: 9058 - RNA, 23 nt, Artificial Sequence
  Synthetic
gacugaucuugaaguaccccgcc

SEQ ID NO: 9059 - RNA, 24 nt, Artificial Sequence
  Synthetic
ggacugaucuugaaguaccccgcc

SEQ ID NO: 9060 - RNA, 18 nt, Artificial Sequence
  Synthetic
gccgccggacauagcgcc

SEQ ID NO: 9061 - RNA, 19 nt, Artificial Sequence
  Synthetic
cgccgccggacauagcgcc

SEQ ID NO: 9062 - RNA, 21 nt, Artificial Sequence
  Synthetic
aacgccgccggacauagcgcc

SEQ ID NO: 9063 - RNA, 22 nt, Artificial Sequence
  Synthetic
gaacgccgccggacauagcgcc

SEQ ID NO: 9064 - RNA, 23 nt, Artificial Sequence
  Synthetic
ggaacgccgccggacauagcgcc

SEQ ID NO: 9065 - RNA, 24 nt, Artificial Sequence
  Synthetic
cggaacgccgccggacauagcgcc

SEQ ID NO: 9066 - RNA, 18 nt, Artificial Sequence
  Synthetic
gcuggggcacuccucgcc

SEQ ID NO: 9067 - RNA, 19 nt, Artificial Sequence
  Synthetic
cgcuggggcacuccucgcc

SEQ ID NO: 9068 - RNA, 21 nt, Artificial Sequence
  Synthetic
gucgcuggggcacuccucgcc

SEQ ID NO: 9069 - RNA, 22 nt, Artificial Sequence
  Synthetic
ggucgcuggggcacuccucgcc

SEQ ID NO: 9070 - RNA, 23 nt, Artificial Sequence
  Synthetic
gggucgcuggggcacuccucgcc

SEQ ID NO: 9071 - RNA, 24 nt, Artificial Sequence
  Synthetic
ggggucgcuggggcacuccucgcc

SEQ ID NO: 9072 - RNA, 18 nt, Artificial Sequence
  Synthetic
agcugaugaugcaaggcc

SEQ ID NO: 9073 - RNA, 19 nt, Artificial Sequence
  Synthetic
gagcugaugaugcaaggcc

SEQ ID NO: 9074 - RNA, 21 nt, Artificial Sequence
  Synthetic
uugagcugaugaugcaaggcc

SEQ ID NO: 9075 - RNA, 22 nt, Artificial Sequence
  Synthetic
cuugagcugaugaugcaaggcc

SEQ ID NO: 9076 - RNA, 23 nt, Artificial Sequence
  Synthetic
ucuugagcugaugaugcaaggcc

SEQ ID NO: 9077 - RNA, 24 nt, Artificial Sequence
  Synthetic
gucuugagcugaugaugcaaggcc

SEQ ID NO: 9078 - RNA, 18 nt, Artificial Sequence
  Synthetic
gccguggccgcgaaggcc

SEQ ID NO: 9079 - RNA, 19 nt, Artificial Sequence
  Synthetic
ggccguggccgcgaaggcc

SEQ ID NO: 9080 - RNA, 21 nt, Artificial Sequence
  Synthetic
uuggccguggccgcgaaggcc

SEQ ID NO: 9081 - RNA, 22 nt, Artificial Sequence
  Synthetic
guuggccguggccgcgaaggcc

SEQ ID NO: 9082 - RNA, 23 nt, Artificial Sequence
  Synthetic
gguuggccguggccgcgaaggcc

SEQ ID NO: 9083 - RNA, 24 nt, Artificial Sequence
  Synthetic
ggguuggccguggccgcgaaggcc

SEQ ID NO: 9084 - RNA, 18 nt, Artificial Sequence
  Synthetic
gaccggauugaacaggcc

SEQ ID NO: 9085 - RNA, 19 nt, Artificial Sequence
  Synthetic
ugaccggauugaacaggcc

SEQ ID NO: 9086 - RNA, 21 nt, Artificial Sequence
  Synthetic
caugaccggauugaacaggcc

SEQ ID NO: 9087 - RNA, 22 nt, Artificial Sequence
  Synthetic
ccaugaccggauugaacaggcc

SEQ ID NO: 9088 - RNA, 23 nt, Artificial Sequence
  Synthetic
uccaugaccggauugaacaggcc

SEQ ID NO: 9089 - RNA, 24 nt, Artificial Sequence
  Synthetic
uuccaugaccggauugaacaggcc

SEQ ID NO: 9090 - RNA, 18 nt, Artificial Sequence
  Synthetic
cacccccagcuccaggcc

SEQ ID NO: 9091 - RNA, 19 nt, Artificial Sequence
  Synthetic
ccacccccagcuccaggcc

SEQ ID NO: 9092 - RNA, 21 nt, Artificial Sequence
  Synthetic
ucccacccccagcuccaggcc

SEQ ID NO: 9093 - RNA, 22 nt, Artificial Sequence
  Synthetic
gucccacccccagcuccaggcc

SEQ ID NO: 9094 - RNA, 23 nt, Artificial Sequence
  Synthetic
cgucccacccccagcuccaggcc

SEQ ID NO: 9095 - RNA, 24 nt, Artificial Sequence
  Synthetic
gcgucccacccccagcuccaggcc

SEQ ID NO: 9096 - RNA, 18 nt, Artificial Sequence
  Synthetic
gucagacggggcacggcc

SEQ ID NO: 9097 - RNA, 19 nt, Artificial Sequence
  Synthetic
cgucagacggggcacggcc

SEQ ID NO: 9098 - RNA, 21 nt, Artificial Sequence
  Synthetic
ugcgucagacggggcacggcc

SEQ ID NO: 9099 - RNA, 22 nt, Artificial Sequence
  Synthetic
augcgucagacggggcacggcc

SEQ ID NO: 9100 - RNA, 23 nt, Artificial Sequence
  Synthetic
caugcgucagacggggcacggcc

SEQ ID NO: 9101 - RNA, 24 nt, Artificial Sequence
  Synthetic
gcaugcgucagacggggcacggcc

SEQ ID NO: 9102 - RNA, 18 nt, Artificial Sequence
  Synthetic
aucucccccgggccggcc

SEQ ID NO: 9103 - RNA, 19 nt, Artificial Sequence
  Synthetic
gaucucccccgggccggcc

SEQ ID NO: 9104 - RNA, 21 nt, Artificial Sequence
  Synthetic
uggaucucccccgggccggcc

SEQ ID NO: 9105 - RNA, 22 nt, Artificial Sequence
  Synthetic
cuggaucucccccgggccggcc

SEQ ID NO: 9106 - RNA, 23 nt, Artificial Sequence
  Synthetic
ccuggaucucccccgggccggcc

SEQ ID NO: 9107 - RNA, 24 nt, Artificial Sequence
  Synthetic
gccuggaucucccccgggccggcc

SEQ ID NO: 9108 - RNA, 18 nt, Artificial Sequence
  Synthetic
gacaggucgcgcagggcc

SEQ ID NO: 9109 - RNA, 19 nt, Artificial Sequence
  Synthetic
cgacaggucgcgcagggcc

SEQ ID NO: 9110 - RNA, 21 nt, Artificial Sequence
  Synthetic
cgcgacaggucgcgcagggcc

SEQ ID NO: 9111 - RNA, 22 nt, Artificial Sequence
  Synthetic
ccgcgacaggucgcgcagggcc

SEQ ID NO: 9112 - RNA, 23 nt, Artificial Sequence
  Synthetic
gccgcgacaggucgcgcagggcc

SEQ ID NO: 9113 - RNA, 24 nt, Artificial Sequence
  Synthetic
ugccgcgacaggucgcgcagggcc

SEQ ID NO: 9114 - RNA, 18 nt, Artificial Sequence
  Synthetic
ggccaccuggagcuggcc

SEQ ID NO: 9115 - RNA, 19 nt, Artificial Sequence
  Synthetic
gggccaccuggagcuggcc

SEQ ID NO: 9116 - RNA, 21 nt, Artificial Sequence
  Synthetic
ccgggccaccuggagcuggcc

SEQ ID NO: 9117 - RNA, 22 nt, Artificial Sequence
  Synthetic
gccgggccaccuggagcuggcc

SEQ ID NO: 9118 - RNA, 23 nt, Artificial Sequence
  Synthetic
ugccgggccaccuggagcuggcc

SEQ ID NO: 9119 - RNA, 24 nt, Artificial Sequence
  Synthetic
gugccgggccaccuggagcuggcc

SEQ ID NO: 9120 - RNA, 18 nt, Artificial Sequence
  Synthetic
cacggguuggccguggcc

SEQ ID NO: 9121 - RNA, 19 nt, Artificial Sequence
  Synthetic
ccacggguuggccguggcc

SEQ ID NO: 9122 - RNA, 21 nt, Artificial Sequence
  Synthetic
gcccacggguuggccguggcc

SEQ ID NO: 9123 - RNA, 22 nt, Artificial Sequence
  Synthetic
cgcccacggguuggccguggcc

SEQ ID NO: 9124 - RNA, 23 nt, Artificial Sequence
  Synthetic
acgcccacggguuggccguggcc

SEQ ID NO: 9125 - RNA, 24 nt, Artificial Sequence
  Synthetic
gacgcccacggguuggccguggcc

SEQ ID NO: 9126 - RNA, 18 nt, Artificial Sequence
  Synthetic
ucgcuggcggcgguggcc

SEQ ID NO: 9127 - RNA, 19 nt, Artificial Sequence
  Synthetic
gucgcuggcggcgguggcc

SEQ ID NO: 9128 - RNA, 21 nt, Artificial Sequence
  Synthetic
acgucgcuggcggcgguggcc

SEQ ID NO: 9129 - RNA, 22 nt, Artificial Sequence
  Synthetic
uacgucgcuggcggcgguggcc

SEQ ID NO: 9130 - RNA, 23 nt, Artificial Sequence
  Synthetic
guacgucgcuggcggcgguggcc

SEQ ID NO: 9131 - RNA, 24 nt, Artificial Sequence
  Synthetic
uguacgucgcuggcggcgguggcc

SEQ ID NO: 9132 - RNA, 18 nt, Artificial Sequence
  Synthetic
gcggggauccggguggcc

SEQ ID NO: 9133 - RNA, 19 nt, Artificial Sequence
  Synthetic
cgcggggauccggguggcc

SEQ ID NO: 9134 - RNA, 21 nt, Artificial Sequence
  Synthetic
ggcgcggggauccggguggcc

SEQ ID NO: 9135 - RNA, 22 nt, Artificial Sequence
  Synthetic
aggcgcggggauccggguggcc

SEQ ID NO: 9136 - RNA, 23 nt, Artificial Sequence
  Synthetic
aaggcgcggggauccggguggcc

SEQ ID NO: 9137 - RNA, 24 nt, Artificial Sequence
  Synthetic
gaaggcgcggggauccggguggcc

SEQ ID NO: 9138 - RNA, 18 nt, Artificial Sequence
  Synthetic
gcgguggcccgccuugcc

SEQ ID NO: 9139 - RNA, 19 nt, Artificial Sequence
  Synthetic
ggcgguggcccgccuugcc

SEQ ID NO: 9140 - RNA, 21 nt, Artificial Sequence
  Synthetic
ccggcgguggcccgccuugcc

SEQ ID NO: 9141 - RNA, 22 nt, Artificial Sequence
  Synthetic
cccggcgguggcccgccuugcc

SEQ ID NO: 9142 - RNA, 23 nt, Artificial Sequence
  Synthetic
ucccggcgguggcccgccuugcc

SEQ ID NO: 9143 - RNA, 24 nt, Artificial Sequence
  Synthetic
cucccggcgguggcccgccuugcc

SEQ ID NO: 9144 - RNA, 18 nt, Artificial Sequence
  Synthetic
uacacggccaugcacucc

SEQ ID NO: 9145 - RNA, 19 nt, Artificial Sequence
  Synthetic
guacacggccaugcacucc

SEQ ID NO: 9146 - RNA, 21 nt, Artificial Sequence
  Synthetic
cgguacacggccaugcacucc

SEQ ID NO: 9147 - RNA, 22 nt, Artificial Sequence
  Synthetic
ccgguacacggccaugcacucc

SEQ ID NO: 9148 - RNA, 23 nt, Artificial Sequence
  Synthetic
cccgguacacggccaugcacucc

SEQ ID NO: 9149 - RNA, 24 nt, Artificial Sequence
  Synthetic
ucccgguacacggccaugcacucc

SEQ ID NO: 9150 - RNA, 18 nt, Artificial Sequence
  Synthetic
gccuccgacgcgcgcucc

SEQ ID NO: 9151 - RNA, 19 nt, Artificial Sequence
  Synthetic
cgccuccgacgcgcgcucc

SEQ ID NO: 9152 - RNA, 21 nt, Artificial Sequence
  Synthetic
uacgccuccgacgcgcgcucc

SEQ ID NO: 9153 - RNA, 22 nt, Artificial Sequence
  Synthetic
guacgccuccgacgcgcgcucc

SEQ ID NO: 9154 - RNA, 23 nt, Artificial Sequence
  Synthetic
aguacgccuccgacgcgcgcucc

SEQ ID NO: 9155 - RNA, 24 nt, Artificial Sequence
  Synthetic
aaguacgccuccgacgcgcgcucc

SEQ ID NO: 9156 - RNA, 18 nt, Artificial Sequence
  Synthetic
gcccccggcggcgcgucc

SEQ ID NO: 9157 - RNA, 19 nt, Artificial Sequence
  Synthetic
cgcccccggcggcgcgucc

SEQ ID NO: 9158 - RNA, 21 nt, Artificial Sequence
  Synthetic
aacgcccccggcggcgcgucc

SEQ ID NO: 9159 - RNA, 22 nt, Artificial Sequence
  Synthetic
aaacgcccccggcggcgcgucc

SEQ ID NO: 9160 - RNA, 23 nt, Artificial Sequence
  Synthetic
uaaacgcccccggcggcgcgucc

SEQ ID NO: 9161 - RNA, 24 nt, Artificial Sequence
  Synthetic
guaaacgcccccggcggcgcgucc

SEQ ID NO: 9162 - RNA, 18 nt, Artificial Sequence
  Synthetic
uccaggccccgggcgucc

SEQ ID NO: 9163 - RNA, 19 nt, Artificial Sequence
  Synthetic
cuccaggccccgggcgucc

SEQ ID NO: 9164 - RNA, 21 nt, Artificial Sequence
  Synthetic
agcuccaggccccgggcgucc

SEQ ID NO: 9165 - RNA, 22 nt, Artificial Sequence
  Synthetic
cagcuccaggccccgggcgucc

SEQ ID NO: 9166 - RNA, 23 nt, Artificial Sequence
  Synthetic
ccagcuccaggccccgggcgucc

SEQ ID NO: 9167 - RNA, 24 nt, Artificial Sequence
  Synthetic
cccagcuccaggccccgggcgucc

SEQ ID NO: 9168 - RNA, 18 nt, Artificial Sequence
  Synthetic
guggccguggugaggucc

SEQ ID NO: 9169 - RNA, 19 nt, Artificial Sequence
  Synthetic
cguggccguggugaggucc

SEQ ID NO: 9170 - RNA, 21 nt, Artificial Sequence
  Synthetic
ugcguggccguggugaggucc

SEQ ID NO: 9171 - RNA, 22 nt, Artificial Sequence
  Synthetic
cugcguggccguggugaggucc

SEQ ID NO: 9172 - RNA, 23 nt, Artificial Sequence
  Synthetic
gcugcguggccguggugaggucc

SEQ ID NO: 9173 - RNA, 24 nt, Artificial Sequence
  Synthetic
ggcugcguggccguggugaggucc

SEQ ID NO: 9174 - RNA, 18 nt, Artificial Sequence
  Synthetic
acggcugccgcguugucc

SEQ ID NO: 9175 - RNA, 19 nt, Artificial Sequence
  Synthetic
cacggcugccgcguugucc

SEQ ID NO: 9176 - RNA, 21 nt, Artificial Sequence
  Synthetic
uacacggcugccgcguugucc

SEQ ID NO: 9177 - RNA, 22 nt, Artificial Sequence
  Synthetic
guacacggcugccgcguugucc

SEQ ID NO: 9178 - RNA, 23 nt, Artificial Sequence
  Synthetic
gguacacggcugccgcguugucc

SEQ ID NO: 9179 - RNA, 24 nt, Artificial Sequence
  Synthetic
agguacacggcugccgcguugucc

SEQ ID NO: 9180 - RNA, 18 nt, Artificial Sequence
  Synthetic
caucggcaacaacaaagc

SEQ ID NO: 9181 - RNA, 19 nt, Artificial Sequence
  Synthetic
gcaucggcaacaacaaagc

SEQ ID NO: 9182 - RNA, 21 nt, Artificial Sequence
  Synthetic
uugcaucggcaacaacaaagc

SEQ ID NO: 9183 - RNA, 22 nt, Artificial Sequence
  Synthetic
guugcaucggcaacaacaaagc

SEQ ID NO: 9184 - RNA, 23 nt, Artificial Sequence
  Synthetic
cguugcaucggcaacaacaaagc

SEQ ID NO: 9185 - RNA, 24 nt, Artificial Sequence
  Synthetic
ucguugcaucggcaacaacaaagc

SEQ ID NO: 9186 - RNA, 18 nt, Artificial Sequence
  Synthetic
acguaaagaacuuaaagc

SEQ ID NO: 9187 - RNA, 19 nt, Artificial Sequence
  Synthetic
gacguaaagaacuuaaagc

SEQ ID NO: 9188 - RNA, 21 nt, Artificial Sequence
  Synthetic
ccgacguaaagaacuuaaagc

SEQ ID NO: 9189 - RNA, 22 nt, Artificial Sequence
  Synthetic
gccgacguaaagaacuuaaagc

SEQ ID NO: 9190 - RNA, 23 nt, Artificial Sequence
  Synthetic
ggccgacguaaagaacuuaaagc

SEQ ID NO: 9191 - RNA, 24 nt, Artificial Sequence
  Synthetic
cggccgacguaaagaacuuaaagc

SEQ ID NO: 9192 - RNA, 18 nt, Artificial Sequence
  Synthetic
ugggccagcaccugcagc

SEQ ID NO: 9193 - RNA, 19 nt, Artificial Sequence
  Synthetic
gugggccagcaccugcagc

SEQ ID NO: 9194 - RNA, 21 nt, Artificial Sequence
  Synthetic
uugugggccagcaccugcagc

SEQ ID NO: 9195 - RNA, 22 nt, Artificial Sequence
  Synthetic
guugugggccagcaccugcagc

SEQ ID NO: 9196 - RNA, 23 nt, Artificial Sequence
  Synthetic
uguugugggccagcaccugcagc

SEQ ID NO: 9197 - RNA, 24 nt, Artificial Sequence
  Synthetic
auguugugggccagcaccugcagc

SEQ ID NO: 9198 - RNA, 18 nt, Artificial Sequence
  Synthetic
guaguuggcccccagagc

SEQ ID NO: 9199 - RNA, 19 nt, Artificial Sequence
  Synthetic
aguaguuggcccccagagc

SEQ ID NO: 9200 - RNA, 21 nt, Artificial Sequence
  Synthetic
aaaguaguuggcccccagagc

SEQ ID NO: 9201 - RNA, 22 nt, Artificial Sequence
  Synthetic
aaaaguaguuggcccccagagc

SEQ ID NO: 9202 - RNA, 23 nt, Artificial Sequence
  Synthetic
gaaaaguaguuggcccccagagc

SEQ ID NO: 9203 - RNA, 24 nt, Artificial Sequence
  Synthetic
cgaaaaguaguuggcccccagagc

SEQ ID NO: 9204 - RNA, 18 nt, Artificial Sequence
  Synthetic
gcgcgcggcugggugagc

SEQ ID NO: 9205 - RNA, 19 nt, Artificial Sequence
  Synthetic
cgcgcgcggcugggugagc

SEQ ID NO: 9206 - RNA, 21 nt, Artificial Sequence
  Synthetic
uucgcgcgcggcugggugagc

SEQ ID NO: 9207 - RNA, 22 nt, Artificial Sequence
  Synthetic
guucgcgcgcggcugggugagc

SEQ ID NO: 9208 - RNA, 23 nt, Artificial Sequence
  Synthetic
cguucgcgcgcggcugggugagc

SEQ ID NO: 9209 - RNA, 24 nt, Artificial Sequence
  Synthetic
acguucgcgcgcggcugggugagc

SEQ ID NO: 9210 - RNA, 18 nt, Artificial Sequence
  Synthetic
gugcagcagcggccccgc

SEQ ID NO: 9211 - RNA, 19 nt, Artificial Sequence
  Synthetic
ggugcagcagcggccccgc

SEQ ID NO: 9212 - RNA, 21 nt, Artificial Sequence
  Synthetic
gcggugcagcagcggccccgc

SEQ ID NO: 9213 - RNA, 22 nt, Artificial Sequence
  Synthetic
cgcggugcagcagcggccccgc

SEQ ID NO: 9214 - RNA, 23 nt, Artificial Sequence
  Synthetic
ccgcggugcagcagcggccccgc

SEQ ID NO: 9215 - RNA, 24 nt, Artificial Sequence
  Synthetic
cccgcggugcagcagcggccccgc

SEQ ID NO: 9216 - RNA, 18 nt, Artificial Sequence
  Synthetic
ggccccggcgaacagcgc

SEQ ID NO: 9217 - RNA, 19 nt, Artificial Sequence
  Synthetic
cggccccggcgaacagcgc

SEQ ID NO: 9218 - RNA, 21 nt, Artificial Sequence
  Synthetic
gucggccccggcgaacagcgc

SEQ ID NO: 9219 - RNA, 22 nt, Artificial Sequence
  Synthetic
ggucggccccggcgaacagcgc

SEQ ID NO: 9220 - RNA, 23 nt, Artificial Sequence
  Synthetic
uggucggccccggcgaacagcgc

SEQ ID NO: 9221 - RNA, 24 nt, Artificial Sequence
  Synthetic
guggucggccccggcgaacagcgc

SEQ ID NO: 9222 - RNA, 18 nt, Artificial Sequence
  Synthetic
cgccgccggacauagcgc

SEQ ID NO: 9223 - RNA, 19 nt, Artificial Sequence
  Synthetic
acgccgccggacauagcgc

SEQ ID NO: 9224 - RNA, 21 nt, Artificial Sequence
  Synthetic
gaacgccgccggacauagcgc

SEQ ID NO: 9225 - RNA, 22 nt, Artificial Sequence
  Synthetic
ggaacgccgccggacauagcgc

SEQ ID NO: 9226 - RNA, 23 nt, Artificial Sequence
  Synthetic
cggaacgccgccggacauagcgc

SEQ ID NO: 9227 - RNA, 24 nt, Artificial Sequence
  Synthetic
ccggaacgccgccggacauagcgc

SEQ ID NO: 9228 - RNA, 18 nt, Artificial Sequence
  Synthetic
gaagugggucucccgcgc

SEQ ID NO: 9229 - RNA, 19 nt, Artificial Sequence
  Synthetic
cgaagugggucucccgcgc

SEQ ID NO: 9230 - RNA, 21 nt, Artificial Sequence
  Synthetic
cgcgaagugggucucccgcgc

SEQ ID NO: 9231 - RNA, 22 nt, Artificial Sequence
  Synthetic
gcgcgaagugggucucccgcgc

SEQ ID NO: 9232 - RNA, 23 nt, Artificial Sequence
  Synthetic
ugcgcgaagugggucucccgcgc

SEQ ID NO: 9233 - RNA, 24 nt, Artificial Sequence
  Synthetic
cugcgcgaagugggucucccgcgc

SEQ ID NO: 9234 - RNA, 18 nt, Artificial Sequence
  Synthetic
cgcuggggcacuccucgc

SEQ ID NO: 9235 - RNA, 19 nt, Artificial Sequence
  Synthetic
ucgcuggggcacuccucgc

SEQ ID NO: 9236 - RNA, 21 nt, Artificial Sequence
  Synthetic
ggucgcuggggcacuccucgc

SEQ ID NO: 9237 - RNA, 22 nt, Artificial Sequence
  Synthetic
gggucgcuggggcacuccucgc

SEQ ID NO: 9238 - RNA, 23 nt, Artificial Sequence
  Synthetic
ggggucgcuggggcacuccucgc

SEQ ID NO: 9239 - RNA, 24 nt, Artificial Sequence
  Synthetic
cggggucgcuggggcacuccucgc

SEQ ID NO: 9240 - RNA, 18 nt, Artificial Sequence
  Synthetic
cucggcgaccagggucgc

SEQ ID NO: 9241 - RNA, 19 nt, Artificial Sequence
  Synthetic
gcucggcgaccagggucgc

SEQ ID NO: 9242 - RNA, 21 nt, Artificial Sequence
  Synthetic
uagcucggcgaccagggucgc

SEQ ID NO: 9243 - RNA, 22 nt, Artificial Sequence
  Synthetic
uuagcucggcgaccagggucgc

SEQ ID NO: 9244 - RNA, 23 nt, Artificial Sequence
  Synthetic
uuuagcucggcgaccagggucgc

SEQ ID NO: 9245 - RNA, 24 nt, Artificial Sequence
  Synthetic
cuuuagcucggcgaccagggucgc

SEQ ID NO: 9246 - RNA, 18 nt, Artificial Sequence
  Synthetic
gguccgucacggggucgc

SEQ ID NO: 9247 - RNA, 19 nt, Artificial Sequence
  Synthetic
ggguccgucacggggucgc

SEQ ID NO: 9248 - RNA, 21 nt, Artificial Sequence
  Synthetic
cgggguccgucacggggucgc

SEQ ID NO: 9249 - RNA, 22 nt, Artificial Sequence
  Synthetic
gcgggguccgucacggggucgc

SEQ ID NO: 9250 - RNA, 23 nt, Artificial Sequence
  Synthetic
cgcgggguccgucacggggucgc

SEQ ID NO: 9251 - RNA, 24 nt, Artificial Sequence
  Synthetic
gcgcgggguccgucacggggucgc

SEQ ID NO: 9252 - RNA, 18 nt, Artificial Sequence
  Synthetic
ggccguggccgcgaaggc

SEQ ID NO: 9253 - RNA, 19 nt, Artificial Sequence
  Synthetic
uggccguggccgcgaaggc

SEQ ID NO: 9254 - RNA, 21 nt, Artificial Sequence
  Synthetic
guuggccguggccgcgaaggc

SEQ ID NO: 9255 - RNA, 22 nt, Artificial Sequence
  Synthetic
gguuggccguggccgcgaaggc

SEQ ID NO: 9256 - RNA, 23 nt, Artificial Sequence
  Synthetic
ggguuggccguggccgcgaaggc

SEQ ID NO: 9257 - RNA, 24 nt, Artificial Sequence
  Synthetic
cggguuggccguggccgcgaaggc

SEQ ID NO: 9258 - RNA, 18 nt, Artificial Sequence
  Synthetic
cuggcggggcgggaaggc

SEQ ID NO: 9259 - RNA, 19 nt, Artificial Sequence
  Synthetic
gcuggcggggcgggaaggc

SEQ ID NO: 9260 - RNA, 21 nt, Artificial Sequence
  Synthetic
cagcuggcggggcgggaaggc

SEQ ID NO: 9261 - RNA, 22 nt, Artificial Sequence
  Synthetic
acagcuggcggggcgggaaggc

SEQ ID NO: 9262 - RNA, 23 nt, Artificial Sequence
  Synthetic
aacagcuggcggggcgggaaggc

SEQ ID NO: 9263 - RNA, 24 nt, Artificial Sequence
  Synthetic
aaacagcuggcggggcgggaaggc

SEQ ID NO: 9264 - RNA, 21 nt, Artificial Sequence
  Synthetic
cucaaacgccccgaggacggc

SEQ ID NO: 9265 - RNA, 22 nt, Artificial Sequence
  Synthetic
gcucaaacgccccgaggacggc

SEQ ID NO: 9266 - RNA, 23 nt, Artificial Sequence
  Synthetic
cgcucaaacgccccgaggacggc

SEQ ID NO: 9267 - RNA, 24 nt, Artificial Sequence
  Synthetic
gcgcucaaacgccccgaggacggc

SEQ ID NO: 9268 - RNA, 18 nt, Artificial Sequence
  Synthetic
gaucucccccgggccggc

SEQ ID NO: 9269 - RNA, 19 nt, Artificial Sequence
  Synthetic
ggaucucccccgggccggc

SEQ ID NO: 9270 - RNA, 21 nt, Artificial Sequence
  Synthetic
cuggaucucccccgggccggc

SEQ ID NO: 9271 - RNA, 22 nt, Artificial Sequence
  Synthetic
ccuggaucucccccgggccggc

SEQ ID NO: 9272 - RNA, 23 nt, Artificial Sequence
  Synthetic
gccuggaucucccccgggccggc

SEQ ID NO: 9273 - RNA, 24 nt, Artificial Sequence
  Synthetic
ggccuggaucucccccgggccggc

SEQ ID NO: 9274 - RNA, 18 nt, Artificial Sequence
  Synthetic
gucugcggcggggccggc

SEQ ID NO: 9275 - RNA, 19 nt, Artificial Sequence
  Synthetic
ugucugcggcggggccggc

SEQ ID NO: 9276 - RNA, 21 nt, Artificial Sequence
  Synthetic
caugucugcggcggggccggc

SEQ ID NO: 9277 - RNA, 22 nt, Artificial Sequence
  Synthetic
gcaugucugcggcggggccggc

SEQ ID NO: 9278 - RNA, 23 nt, Artificial Sequence
  Synthetic
ugcaugucugcggcggggccggc

SEQ ID NO: 9279 - RNA, 24 nt, Artificial Sequence
  Synthetic
cugcaugucugcggcggggccggc

SEQ ID NO: 9280 - RNA, 18 nt, Artificial Sequence
  Synthetic
auccgcggcguccgcggc

SEQ ID NO: 9281 - RNA, 19 nt, Artificial Sequence
  Synthetic
cauccgcggcguccgcggc

SEQ ID NO: 9282 - RNA, 21 nt, Artificial Sequence
  Synthetic
gucauccgcggcguccgcggc

SEQ ID NO: 9283 - RNA, 22 nt, Artificial Sequence
  Synthetic
ggucauccgcggcguccgcggc

SEQ ID NO: 9284 - RNA, 23 nt, Artificial Sequence
  Synthetic
cggucauccgcggcguccgcggc

SEQ ID NO: 9285 - RNA, 24 nt, Artificial Sequence
  Synthetic
ccggucauccgcggcguccgcggc

SEQ ID NO: 9286 - RNA, 18 nt, Artificial Sequence
  Synthetic
cgacaggucgcgcagggc

SEQ ID NO: 9287 - RNA, 19 nt, Artificial Sequence
  Synthetic
gcgacaggucgcgcagggc

SEQ ID NO: 9288 - RNA, 21 nt, Artificial Sequence
  Synthetic
ccgcgacaggucgcgcagggc

SEQ ID NO: 9289 - RNA, 22 nt, Artificial Sequence
  Synthetic
gccgcgacaggucgcgcagggc

SEQ ID NO: 9290 - RNA, 23 nt, Artificial Sequence
  Synthetic
ugccgcgacaggucgcgcagggc

SEQ ID NO: 9291 - RNA, 24 nt, Artificial Sequence
  Synthetic
cugccgcgacaggucgcgcagggc

SEQ ID NO: 9292 - RNA, 18 nt, Artificial Sequence
  Synthetic
cuggaccacgagccgggc

SEQ ID NO: 9293 - RNA, 19 nt, Artificial Sequence
  Synthetic
acuggaccacgagccgggc

SEQ ID NO: 9294 - RNA, 21 nt, Artificial Sequence
  Synthetic
gcacuggaccacgagccgggc

SEQ ID NO: 9295 - RNA, 22 nt, Artificial Sequence
  Synthetic
ugcacuggaccacgagccgggc

SEQ ID NO: 9296 - RNA, 23 nt, Artificial Sequence
  Synthetic
augcacuggaccacgagccgggc

SEQ ID NO: 9297 - RNA, 24 nt, Artificial Sequence
  Synthetic
gaugcacuggaccacgagccgggc

SEQ ID NO: 9298 - RNA, 18 nt, Artificial Sequence
  Synthetic
aaaaacagcuggcggggc

SEQ ID NO: 9299 - RNA, 19 nt, Artificial Sequence
  Synthetic
aaaaaacagcuggcggggc

SEQ ID NO: 9300 - RNA, 21 nt, Artificial Sequence
  Synthetic
caaaaaaacagcuggcggggc

SEQ ID NO: 9301 - RNA, 22 nt, Artificial Sequence
  Synthetic
ccaaaaaaacagcuggcggggc

SEQ ID NO: 9302 - RNA, 23 nt, Artificial Sequence
  Synthetic
cccaaaaaaacagcuggcggggc

SEQ ID NO: 9303 - RNA, 24 nt, Artificial Sequence
  Synthetic
ccccaaaaaaacagcuggcggggc

SEQ ID NO: 9304 - RNA, 18 nt, Artificial Sequence
  Synthetic
auccggguggccgggggc

SEQ ID NO: 9305 - RNA, 19 nt, Artificial Sequence
  Synthetic
gauccggguggccgggggc

SEQ ID NO: 9306 - RNA, 21 nt, Artificial Sequence
  Synthetic
gggauccggguggccgggggc

SEQ ID NO: 9307 - RNA, 22 nt, Artificial Sequence
  Synthetic
ggggauccggguggccgggggc

SEQ ID NO: 9308 - RNA, 23 nt, Artificial Sequence
  Synthetic
cggggauccggguggccgggggc

SEQ ID NO: 9309 - RNA, 24 nt, Artificial Sequence
  Synthetic
gcggggauccggguggccgggggc

SEQ ID NO: 9310 - RNA, 18 nt, Artificial Sequence
  Synthetic
gucaucaaccagcugggc

SEQ ID NO: 9311 - RNA, 19 nt, Artificial Sequence
  Synthetic
agucaucaaccagcugggc

SEQ ID NO: 9312 - RNA, 21 nt, Artificial Sequence
  Synthetic
aaagucaucaaccagcugggc

SEQ ID NO: 9313 - RNA, 22 nt, Artificial Sequence
  Synthetic
uaaagucaucaaccagcugggc

SEQ ID NO: 9314 - RNA, 23 nt, Artificial Sequence
  Synthetic
guaaagucaucaaccagcugggc

SEQ ID NO: 9315 - RNA, 24 nt, Artificial Sequence
  Synthetic
gguaaagucaucaaccagcugggc

SEQ ID NO: 9316 - RNA, 18 nt, Artificial Sequence
  Synthetic
cgcggggauccggguggc

SEQ ID NO: 9317 - RNA, 19 nt, Artificial Sequence
  Synthetic
gcgcggggauccggguggc

SEQ ID NO: 9318 - RNA, 21 nt, Artificial Sequence
  Synthetic
aggcgcggggauccggguggc

SEQ ID NO: 9319 - RNA, 22 nt, Artificial Sequence
  Synthetic
aaggcgcggggauccggguggc

SEQ ID NO: 9320 - RNA, 23 nt, Artificial Sequence
  Synthetic
gaaggcgcggggauccggguggc

SEQ ID NO: 9321 - RNA, 24 nt, Artificial Sequence
  Synthetic
ggaaggcgcggggauccggguggc

SEQ ID NO: 9322 - RNA, 18 nt, Artificial Sequence
  Synthetic
aacggcggcgaugguggc

SEQ ID NO: 9323 - RNA, 19 nt, Artificial Sequence
  Synthetic
gaacggcggcgaugguggc

SEQ ID NO: 9324 - RNA, 21 nt, Artificial Sequence
  Synthetic
gcgaacggcggcgaugguggc

SEQ ID NO: 9325 - RNA, 22 nt, Artificial Sequence
  Synthetic
cgcgaacggcggcgaugguggc

SEQ ID NO: 9326 - RNA, 23 nt, Artificial Sequence
  Synthetic
ccgcgaacggcggcgaugguggc

SEQ ID NO: 9327 - RNA, 24 nt, Artificial Sequence
  Synthetic
cccgcgaacggcggcgaugguggc

SEQ ID NO: 9328 - RNA, 18 nt, Artificial Sequence
  Synthetic
augguaugguccagaugc

SEQ ID NO: 9329 - RNA, 19 nt, Artificial Sequence
  Synthetic
gaugguaugguccagaugc

SEQ ID NO: 9330 - RNA, 21 nt, Artificial Sequence
  Synthetic
uggaugguaugguccagaugc

SEQ ID NO: 9331 - RNA, 22 nt, Artificial Sequence
  Synthetic
uuggaugguaugguccagaugc

SEQ ID NO: 9332 - RNA, 23 nt, Artificial Sequence
  Synthetic
uuuggaugguaugguccagaugc

SEQ ID NO: 9333 - RNA, 24 nt, Artificial Sequence
  Synthetic
uuuuggaugguaugguccagaugc

SEQ ID NO: 9334 - RNA, 18 nt, Artificial Sequence
  Synthetic
acuuucaggaaggacugc

SEQ ID NO: 9335 - RNA, 19 nt, Artificial Sequence
  Synthetic
cacuuucaggaaggacugc

SEQ ID NO: 9336 - RNA, 21 nt, Artificial Sequence
  Synthetic
uccacuuucaggaaggacugc

SEQ ID NO: 9337 - RNA, 22 nt, Artificial Sequence
  Synthetic
cuccacuuucaggaaggacugc

SEQ ID NO: 9338 - RNA, 23 nt, Artificial Sequence
  Synthetic
ccuccacuuucaggaaggacugc

SEQ ID NO: 9339 - RNA, 24 nt, Artificial Sequence
  Synthetic
uccuccacuuucaggaaggacugc

SEQ ID NO: 9340 - RNA, 18 nt, Artificial Sequence
  Synthetic
ucauagacgagauacugc

SEQ ID NO: 9341 - RNA, 19 nt, Artificial Sequence
  Synthetic
gucauagacgagauacugc

SEQ ID NO: 9342 - RNA, 21 nt, Artificial Sequence
  Synthetic
gcgucauagacgagauacugc

SEQ ID NO: 9343 - RNA, 22 nt, Artificial Sequence
  Synthetic
ugcgucauagacgagauacugc

SEQ ID NO: 9344 - RNA, 23 nt, Artificial Sequence
  Synthetic
augcgucauagacgagauacugc

SEQ ID NO: 9345 - RNA, 24 nt, Artificial Sequence
  Synthetic
gaugcgucauagacgagauacugc

SEQ ID NO: 9346 - RNA, 18 nt, Artificial Sequence
  Synthetic
accagauuggccgggugc

SEQ ID NO: 9347 - RNA, 19 nt, Artificial Sequence
  Synthetic
caccagauuggccgggugc

SEQ ID NO: 9348 - RNA, 21 nt, Artificial Sequence
  Synthetic
gccaccagauuggccgggugc

SEQ ID NO: 9349 - RNA, 22 nt, Artificial Sequence
  Synthetic
ggccaccagauuggccgggugc

SEQ ID NO: 9350 - RNA, 23 nt, Artificial Sequence
  Synthetic
uggccaccagauuggccgggugc

SEQ ID NO: 9351 - RNA, 24 nt, Artificial Sequence
  Synthetic
uuggccaccagauuggccgggugc

SEQ ID NO: 9352 - RNA, 18 nt, Artificial Sequence
  Synthetic
gccgggugcagggggugc

SEQ ID NO: 9353 - RNA, 19 nt, Artificial Sequence
  Synthetic
ggccgggugcagggggugc

SEQ ID NO: 9354 - RNA, 21 nt, Artificial Sequence
  Synthetic
uuggccgggugcagggggugc

SEQ ID NO: 9355 - RNA, 22 nt, Artificial Sequence
  Synthetic
auuggccgggugcagggggugc

SEQ ID NO: 9356 - RNA, 23 nt, Artificial Sequence
  Synthetic
gauuggccgggugcagggggugc

SEQ ID NO: 9357 - RNA, 24 nt, Artificial Sequence
  Synthetic
agauuggccgggugcagggggugc

SEQ ID NO: 9358 - RNA, 18 nt, Artificial Sequence
  Synthetic
cgcacggccuugcccauc

SEQ ID NO: 9359 - RNA, 19 nt, Artificial Sequence
  Synthetic
ucgcacggccuugcccauc

SEQ ID NO: 9360 - RNA, 21 nt, Artificial Sequence
  Synthetic
cuucgcacggccuugcccauc

SEQ ID NO: 9361 - RNA, 22 nt, Artificial Sequence
  Synthetic
acuucgcacggccuugcccauc

SEQ ID NO: 9362 - RNA, 23 nt, Artificial Sequence
  Synthetic
gacuucgcacggccuugcccauc

SEQ ID NO: 9363 - RNA, 24 nt, Artificial Sequence
  Synthetic
agacuucgcacggccuugcccauc

SEQ ID NO: 9364 - RNA, 18 nt, Artificial Sequence
  Synthetic
aaggccacgggacugauc

SEQ ID NO: 9365 - RNA, 19 nt, Artificial Sequence
  Synthetic
caaggccacgggacugauc

SEQ ID NO: 9366 - RNA, 21 nt, Artificial Sequence
  Synthetic
ugcaaggccacgggacugauc

SEQ ID NO: 9367 - RNA, 22 nt, Artificial Sequence
  Synthetic
augcaaggccacgggacugauc

SEQ ID NO: 9368 - RNA, 23 nt, Artificial Sequence
  Synthetic
gaugcaaggccacgggacugauc

SEQ ID NO: 9369 - RNA, 24 nt, Artificial Sequence
  Synthetic
ugaugcaaggccacgggacugauc

SEQ ID NO: 9370 - RNA, 18 nt, Artificial Sequence
  Synthetic
ggugagcggguaggccuc

SEQ ID NO: 9371 - RNA, 19 nt, Artificial Sequence
  Synthetic
aggugagcggguaggccuc

SEQ ID NO: 9372 - RNA, 21 nt, Artificial Sequence
  Synthetic
gcaggugagcggguaggccuc

SEQ ID NO: 9373 - RNA, 22 nt, Artificial Sequence
  Synthetic
cgcaggugagcggguaggccuc

SEQ ID NO: 9374 - RNA, 23 nt, Artificial Sequence
  Synthetic
gcgcaggugagcggguaggccuc

SEQ ID NO: 9375 - RNA, 24 nt, Artificial Sequence
  Synthetic
ggcgcaggugagcggguaggccuc

SEQ ID NO: 9376 - RNA, 18 nt, Artificial Sequence
  Synthetic
gcgcuucuccagggccuc

SEQ ID NO: 9377 - RNA, 19 nt, Artificial Sequence
  Synthetic
ugcgcuucuccagggccuc

SEQ ID NO: 9378 - RNA, 21 nt, Artificial Sequence
  Synthetic
gaugcgcuucuccagggccuc

SEQ ID NO: 9379 - RNA, 22 nt, Artificial Sequence
  Synthetic
agaugcgcuucuccagggccuc

SEQ ID NO: 9380 - RNA, 23 nt, Artificial Sequence
  Synthetic
uagaugcgcuucuccagggccuc

SEQ ID NO: 9381 - RNA, 24 nt, Artificial Sequence
  Synthetic
guagaugcgcuucuccagggccuc

SEQ ID NO: 9382 - RNA, 18 nt, Artificial Sequence
  Synthetic
cacggccaugcacuccuc

SEQ ID NO: 9383 - RNA, 19 nt, Artificial Sequence
  Synthetic
acacggccaugcacuccuc

SEQ ID NO: 9384 - RNA, 21 nt, Artificial Sequence
  Synthetic
guacacggccaugcacuccuc

SEQ ID NO: 9385 - RNA, 22 nt, Artificial Sequence
  Synthetic
gguacacggccaugcacuccuc

SEQ ID NO: 9386 - RNA, 23 nt, Artificial Sequence
  Synthetic
cgguacacggccaugcacuccuc

SEQ ID NO: 9387 - RNA, 24 nt, Artificial Sequence
  Synthetic
ccgguacacggccaugcacuccuc

SEQ ID NO: 9388 - RNA, 18 nt, Artificial Sequence
  Synthetic
gaacgcggggugcagcuc

SEQ ID NO: 9389 - RNA, 19 nt, Artificial Sequence
  Synthetic
cgaacgcggggugcagcuc

SEQ ID NO: 9390 - RNA, 21 nt, Artificial Sequence
  Synthetic
gucgaacgcggggugcagcuc

SEQ ID NO: 9391 - RNA, 22 nt, Artificial Sequence
  Synthetic
agucgaacgcggggugcagcuc

SEQ ID NO: 9392 - RNA, 23 nt, Artificial Sequence
  Synthetic
aagucgaacgcggggugcagcuc

SEQ ID NO: 9393 - RNA, 24 nt, Artificial Sequence
  Synthetic
gaagucgaacgcggggugcagcuc

SEQ ID NO: 9394 - RNA, 18 nt, Artificial Sequence
  Synthetic
gucgucuggggggcgcuc

SEQ ID NO: 9395 - RNA, 19 nt, Artificial Sequence
  Synthetic
cgucgucuggggggcgcuc

SEQ ID NO: 9396 - RNA, 21 nt, Artificial Sequence
  Synthetic
cgcgucgucuggggggcgcuc

SEQ ID NO: 9397 - RNA, 22 nt, Artificial Sequence
  Synthetic
gcgcgucgucuggggggcgcuc

SEQ ID NO: 9398 - RNA, 23 nt, Artificial Sequence
  Synthetic
cgcgcgucgucuggggggcgcuc

SEQ ID NO: 9399 - RNA, 24 nt, Artificial Sequence
  Synthetic
acgcgcgucgucuggggggcgcuc

SEQ ID NO: 9400 - RNA, 18 nt, Artificial Sequence
  Synthetic
cucgccgggggcgaucuc

SEQ ID NO: 9401 - RNA, 19 nt, Artificial Sequence
  Synthetic
ccucgccgggggcgaucuc

SEQ ID NO: 9402 - RNA, 21 nt, Artificial Sequence
  Synthetic
cuccucgccgggggcgaucuc

SEQ ID NO: 9403 - RNA, 22 nt, Artificial Sequence
  Synthetic
acuccucgccgggggcgaucuc

SEQ ID NO: 9404 - RNA, 23 nt, Artificial Sequence
  Synthetic
cacuccucgccgggggcgaucuc

SEQ ID NO: 9405 - RNA, 24 nt, Artificial Sequence
  Synthetic
gcacuccucgccgggggcgaucuc

SEQ ID NO: 9406 - RNA, 18 nt, Artificial Sequence
  Synthetic
cuccccggccgcgcucuc

SEQ ID NO: 9407 - RNA, 19 nt, Artificial Sequence
  Synthetic
ucuccccggccgcgcucuc

SEQ ID NO: 9408 - RNA, 21 nt, Artificial Sequence
  Synthetic
guucuccccggccgcgcucuc

SEQ ID NO: 9409 - RNA, 22 nt, Artificial Sequence
  Synthetic
cguucuccccggccgcgcucuc

SEQ ID NO: 9410 - RNA, 23 nt, Artificial Sequence
  Synthetic
gcguucuccccggccgcgcucuc

SEQ ID NO: 9411 - RNA, 24 nt, Artificial Sequence
  Synthetic
cgcguucuccccggccgcgcucuc

SEQ ID NO: 9412 - RNA, 18 nt, Artificial Sequence
  Synthetic
ggcguagaugcgcuucuc

SEQ ID NO: 9413 - RNA, 19 nt, Artificial Sequence
  Synthetic
cggcguagaugcgcuucuc

SEQ ID NO: 9414 - RNA, 21 nt, Artificial Sequence
  Synthetic
ggcggcguagaugcgcuucuc

SEQ ID NO: 9415 - RNA, 22 nt, Artificial Sequence
  Synthetic
uggcggcguagaugcgcuucuc

SEQ ID NO: 9416 - RNA, 23 nt, Artificial Sequence
  Synthetic
guggcggcguagaugcgcuucuc

SEQ ID NO: 9417 - RNA, 24 nt, Artificial Sequence
  Synthetic
gguggcggcguagaugcgcuucuc

SEQ ID NO: 9418 - RNA, 18 nt, Artificial Sequence
  Synthetic
ccgggauggaggcccguc

SEQ ID NO: 9419 - RNA, 19 nt, Artificial Sequence
  Synthetic
cccgggauggaggcccguc

SEQ ID NO: 9420 - RNA, 21 nt, Artificial Sequence
  Synthetic
aacccgggauggaggcccguc

SEQ ID NO: 9421 - RNA, 22 nt, Artificial Sequence
  Synthetic
aaacccgggauggaggcccguc

SEQ ID NO: 9422 - RNA, 23 nt, Artificial Sequence
  Synthetic
caaacccgggauggaggcccguc

SEQ ID NO: 9423 - RNA, 24 nt, Artificial Sequence
  Synthetic
ccaaacccgggauggaggcccguc

SEQ ID NO: 9424 - RNA, 18 nt, Artificial Sequence
  Synthetic
gggugcgcgggguccguc

SEQ ID NO: 9425 - RNA, 19 nt, Artificial Sequence
  Synthetic
ggggugcgcgggguccguc

SEQ ID NO: 9426 - RNA, 21 nt, Artificial Sequence
  Synthetic
agggggugcgcgggguccguc

SEQ ID NO: 9427 - RNA, 22 nt, Artificial Sequence
  Synthetic
cagggggugcgcgggguccguc

SEQ ID NO: 9428 - RNA, 23 nt, Artificial Sequence
  Synthetic
gcagggggugcgcgggguccguc

SEQ ID NO: 9429 - RNA, 24 nt, Artificial Sequence
  Synthetic
ugcagggggugcgcgggguccguc

SEQ ID NO: 9430 - RNA, 18 nt, Artificial Sequence
  Synthetic
cuccaggccccgggcguc

SEQ ID NO: 9431 - RNA, 19 nt, Artificial Sequence
  Synthetic
gcuccaggccccgggcguc

SEQ ID NO: 9432 - RNA, 21 nt, Artificial Sequence
  Synthetic
cagcuccaggccccgggcguc

SEQ ID NO: 9433 - RNA, 22 nt, Artificial Sequence
  Synthetic
ccagcuccaggccccgggcguc

SEQ ID NO: 9434 - RNA, 23 nt, Artificial Sequence
  Synthetic
cccagcuccaggccccgggcguc

SEQ ID NO: 9435 - RNA, 24 nt, Artificial Sequence
  Synthetic
ccccagcuccaggccccgggcguc

SEQ ID NO: 9436 - RNA, 18 nt, Artificial Sequence
  Synthetic
gcgcgcacgcgcgucguc

SEQ ID NO: 9437 - RNA, 19 nt, Artificial Sequence
  Synthetic
cgcgcgcacgcgcgucguc

SEQ ID NO: 9438 - RNA, 21 nt, Artificial Sequence
  Synthetic
uccgcgcgcacgcgcgucguc

SEQ ID NO: 9439 - RNA, 22 nt, Artificial Sequence
  Synthetic
auccgcgcgcacgcgcgucguc

SEQ ID NO: 9440 - RNA, 23 nt, Artificial Sequence
  Synthetic
gauccgcgcgcacgcgcgucguc

SEQ ID NO: 9441 - RNA, 24 nt, Artificial Sequence
  Synthetic
agauccgcgcgcacgcgcgucguc

SEQ ID NO: 9442 - RNA, 18 nt, Artificial Sequence
  Synthetic
gcagucgcgauggcgguc

SEQ ID NO: 9443 - RNA, 19 nt, Artificial Sequence
  Synthetic
ggcagucgcgauggcgguc

SEQ ID NO: 9444 - RNA, 21 nt, Artificial Sequence
  Synthetic
ccggcagucgcgauggcgguc

SEQ ID NO: 9445 - RNA, 22 nt, Artificial Sequence
  Synthetic
cccggcagucgcgauggcgguc

SEQ ID NO: 9446 - RNA, 23 nt, Artificial Sequence
  Synthetic
acccggcagucgcgauggcgguc

SEQ ID NO: 9447 - RNA, 24 nt, Artificial Sequence
  Synthetic
aacccggcagucgcgauggcgguc

SEQ ID NO: 9448 - RNA, 18 nt, Artificial Sequence
  Synthetic
cacggcugccgcguuguc

SEQ ID NO: 9449 - RNA, 19 nt, Artificial Sequence
  Synthetic
acacggcugccgcguuguc

SEQ ID NO: 9450 - RNA, 21 nt, Artificial Sequence
  Synthetic
guacacggcugccgcguuguc

SEQ ID NO: 9451 - RNA, 22 nt, Artificial Sequence
  Synthetic
gguacacggcugccgcguuguc

SEQ ID NO: 9452 - RNA, 23 nt, Artificial Sequence
  Synthetic
agguacacggcugccgcguuguc

SEQ ID NO: 9453 - RNA, 24 nt, Artificial Sequence
  Synthetic
cagguacacggcugccgcguuguc

SEQ ID NO: 9454 - RNA, 18 nt, Artificial Sequence
  Synthetic
accagcgaguagucguuc

SEQ ID NO: 9455 - RNA, 19 nt, Artificial Sequence
  Synthetic
gaccagcgaguagucguuc

SEQ ID NO: 9456 - RNA, 21 nt, Artificial Sequence
  Synthetic
gagaccagcgaguagucguuc

SEQ ID NO: 9457 - RNA, 22 nt, Artificial Sequence
  Synthetic
cgagaccagcgaguagucguuc

SEQ ID NO: 9458 - RNA, 23 nt, Artificial Sequence
  Synthetic
acgagaccagcgaguagucguuc

SEQ ID NO: 9459 - RNA, 24 nt, Artificial Sequence
  Synthetic
uacgagaccagcgaguagucguuc

SEQ ID NO: 9460 - RNA, 18 nt, Artificial Sequence
  Synthetic
ggucccgaucgcguguuc

SEQ ID NO: 9461 - RNA, 19 nt, Artificial Sequence
  Synthetic
cggucccgaucgcguguuc

SEQ ID NO: 9462 - RNA, 21 nt, Artificial Sequence
  Synthetic
cacggucccgaucgcguguuc

SEQ ID NO: 9463 - RNA, 22 nt, Artificial Sequence
  Synthetic
acacggucccgaucgcguguuc

SEQ ID NO: 9464 - RNA, 23 nt, Artificial Sequence
  Synthetic
cacacggucccgaucgcguguuc

SEQ ID NO: 9465 - RNA, 24 nt, Artificial Sequence
  Synthetic
gcacacggucccgaucgcguguuc

SEQ ID NO: 9466 - RNA, 18 nt, Artificial Sequence
  Synthetic
ucgguguccuccacuuuc

SEQ ID NO: 9467 - RNA, 19 nt, Artificial Sequence
  Synthetic
uucgguguccuccacuuuc

SEQ ID NO: 9468 - RNA, 21 nt, Artificial Sequence
  Synthetic
gcuucgguguccuccacuuuc

SEQ ID NO: 9469 - RNA, 22 nt, Artificial Sequence
  Synthetic
ggcuucgguguccuccacuuuc

SEQ ID NO: 9470 - RNA, 23 nt, Artificial Sequence
  Synthetic
cggcuucgguguccuccacuuuc

SEQ ID NO: 9471 - RNA, 24 nt, Artificial Sequence
  Synthetic
ucggcuucgguguccuccacuuuc

SEQ ID NO: 9472 - RNA, 18 nt, Artificial Sequence
  Synthetic
gacguaaagaacuuaaag

SEQ ID NO: 9473 - RNA, 19 nt, Artificial Sequence
  Synthetic
cgacguaaagaacuuaaag

SEQ ID NO: 9474 - RNA, 21 nt, Artificial Sequence
  Synthetic
gccgacguaaagaacuuaaag

SEQ ID NO: 9475 - RNA, 22 nt, Artificial Sequence
  Synthetic
ggccgacguaaagaacuuaaag

SEQ ID NO: 9476 - RNA, 23 nt, Artificial Sequence
  Synthetic
cggccgacguaaagaacuuaaag

SEQ ID NO: 9477 - RNA, 24 nt, Artificial Sequence
  Synthetic
ucggccgacguaaagaacuuaaag

SEQ ID NO: 9478 - RNA, 18 nt, Artificial Sequence
  Synthetic
gccacccccacaaagaag

SEQ ID NO: 9479 - RNA, 19 nt, Artificial Sequence
  Synthetic
ggccacccccacaaagaag

SEQ ID NO: 9480 - RNA, 21 nt, Artificial Sequence
  Synthetic
ucggccacccccacaaagaag

SEQ ID NO: 9481 - RNA, 22 nt, Artificial Sequence
  Synthetic
gucggccacccccacaaagaag

SEQ ID NO: 9482 - RNA, 23 nt, Artificial Sequence
  Synthetic
cgucggccacccccacaaagaag

SEQ ID NO: 9483 - RNA, 24 nt, Artificial Sequence
  Synthetic
acgucggccacccccacaaagaag

SEQ ID NO: 9484 - RNA, 18 nt, Artificial Sequence
  Synthetic
cagcggccccgcgagaag

SEQ ID NO: 9485 - RNA, 19 nt, Artificial Sequence
  Synthetic
gcagcggccccgcgagaag

SEQ ID NO: 9486 - RNA, 21 nt, Artificial Sequence
  Synthetic
cagcagcggccccgcgagaag

SEQ ID NO: 9487 - RNA, 22 nt, Artificial Sequence
  Synthetic
gcagcagcggccccgcgagaag

SEQ ID NO: 9488 - RNA, 23 nt, Artificial Sequence
  Synthetic
ugcagcagcggccccgcgagaag

SEQ ID NO: 9489 - RNA, 24 nt, Artificial Sequence
  Synthetic
gugcagcagcggccccgcgagaag

SEQ ID NO: 9490 - RNA, 18 nt, Artificial Sequence
  Synthetic
gguaaagucaucaaccag

SEQ ID NO: 9491 - RNA, 19 nt, Artificial Sequence
  Synthetic
ggguaaagucaucaaccag

SEQ ID NO: 9492 - RNA, 21 nt, Artificial Sequence
  Synthetic
caggguaaagucaucaaccag

SEQ ID NO: 9493 - RNA, 22 nt, Artificial Sequence
  Synthetic
ucaggguaaagucaucaaccag

SEQ ID NO: 9494 - RNA, 23 nt, Artificial Sequence
  Synthetic
gucaggguaaagucaucaaccag

SEQ ID NO: 9495 - RNA, 24 nt, Artificial Sequence
  Synthetic
ggucaggguaaagucaucaaccag

SEQ ID NO: 9496 - RNA, 18 nt, Artificial Sequence
  Synthetic
cagagccggggggaccag

SEQ ID NO: 9497 - RNA, 19 nt, Artificial Sequence
  Synthetic
ccagagccggggggaccag

SEQ ID NO: 9498 - RNA, 21 nt, Artificial Sequence
  Synthetic
ccccagagccggggggaccag

SEQ ID NO: 9499 - RNA, 22 nt, Artificial Sequence
  Synthetic
cccccagagccggggggaccag

SEQ ID NO: 9500 - RNA, 23 nt, Artificial Sequence
  Synthetic
gcccccagagccggggggaccag

SEQ ID NO: 9501 - RNA, 24 nt, Artificial Sequence
  Synthetic
ggcccccagagccggggggaccag

SEQ ID NO: 9502 - RNA, 18 nt, Artificial Sequence
  Synthetic
ggcugccgcguuguccag

SEQ ID NO: 9503 - RNA, 19 nt, Artificial Sequence
  Synthetic
cggcugccgcguuguccag

SEQ ID NO: 9504 - RNA, 21 nt, Artificial Sequence
  Synthetic
cacggcugccgcguuguccag

SEQ ID NO: 9505 - RNA, 22 nt, Artificial Sequence
  Synthetic
acacggcugccgcguuguccag

SEQ ID NO: 9506 - RNA, 23 nt, Artificial Sequence
  Synthetic
uacacggcugccgcguuguccag

SEQ ID NO: 9507 - RNA, 24 nt, Artificial Sequence
  Synthetic
guacacggcugccgcguuguccag

SEQ ID NO: 9508 - RNA, 18 nt, Artificial Sequence
  Synthetic
gcggggucgcuggcgcag

SEQ ID NO: 9509 - RNA, 19 nt, Artificial Sequence
  Synthetic
ggcggggucgcuggcgcag

SEQ ID NO: 9510 - RNA, 21 nt, Artificial Sequence
  Synthetic
agggcggggucgcuggcgcag

SEQ ID NO: 9511 - RNA, 22 nt, Artificial Sequence
  Synthetic
gagggcggggucgcuggcgcag

SEQ ID NO: 9512 - RNA, 23 nt, Artificial Sequence
  Synthetic
ggagggcggggucgcuggcgcag

SEQ ID NO: 9513 - RNA, 24 nt, Artificial Sequence
  Synthetic
aggagggcggggucgcuggcgcag

SEQ ID NO: 9514 - RNA, 18 nt, Artificial Sequence
  Synthetic
cgugucggcaugcgucag

SEQ ID NO: 9515 - RNA, 19 nt, Artificial Sequence
  Synthetic
gcgugucggcaugcgucag

SEQ ID NO: 9516 - RNA, 21 nt, Artificial Sequence
  Synthetic
gcgcgugucggcaugcgucag

SEQ ID NO: 9517 - RNA, 22 nt, Artificial Sequence
  Synthetic
cgcgcgugucggcaugcgucag

SEQ ID NO: 9518 - RNA, 23 nt, Artificial Sequence
  Synthetic
ccgcgcgugucggcaugcgucag

SEQ ID NO: 9519 - RNA, 24 nt, Artificial Sequence
  Synthetic
cccgcgcgugucggcaugcgucag

SEQ ID NO: 9520 - RNA, 18 nt, Artificial Sequence
  Synthetic
aguaguuggcccccagag

SEQ ID NO: 9521 - RNA, 19 nt, Artificial Sequence
  Synthetic
aaguaguuggcccccagag

SEQ ID NO: 9522 - RNA, 21 nt, Artificial Sequence
  Synthetic
aaaaguaguuggcccccagag

SEQ ID NO: 9523 - RNA, 22 nt, Artificial Sequence
  Synthetic
gaaaaguaguuggcccccagag

SEQ ID NO: 9524 - RNA, 23 nt, Artificial Sequence
  Synthetic
cgaaaaguaguuggcccccagag

SEQ ID NO: 9525 - RNA, 24 nt, Artificial Sequence
  Synthetic
acgaaaaguaguuggcccccagag

SEQ ID NO: 9526 - RNA, 18 nt, Artificial Sequence
  Synthetic
ccgcguuguccaggagag

SEQ ID NO: 9527 - RNA, 19 nt, Artificial Sequence
  Synthetic
gccgcguuguccaggagag

SEQ ID NO: 9528 - RNA, 21 nt, Artificial Sequence
  Synthetic
cugccgcguuguccaggagag

SEQ ID NO: 9529 - RNA, 22 nt, Artificial Sequence
  Synthetic
gcugccgcguuguccaggagag

SEQ ID NO: 9530 - RNA, 23 nt, Artificial Sequence
  Synthetic
ggcugccgcguuguccaggagag

SEQ ID NO: 9531 - RNA, 24 nt, Artificial Sequence
  Synthetic
cggcugccgcguuguccaggagag

SEQ ID NO: 9532 - RNA, 18 nt, Artificial Sequence
  Synthetic
gaugcacuggaccacgag

SEQ ID NO: 9533 - RNA, 19 nt, Artificial Sequence
  Synthetic
ugaugcacuggaccacgag

SEQ ID NO: 9534 - RNA, 21 nt, Artificial Sequence
  Synthetic
ggugaugcacuggaccacgag

SEQ ID NO: 9535 - RNA, 22 nt, Artificial Sequence
  Synthetic
uggugaugcacuggaccacgag

SEQ ID NO: 9536 - RNA, 23 nt, Artificial Sequence
  Synthetic
cuggugaugcacuggaccacgag

SEQ ID NO: 9537 - RNA, 24 nt, Artificial Sequence
  Synthetic
gcuggugaugcacuggaccacgag

SEQ ID NO: 9538 - RNA, 18 nt, Artificial Sequence
  Synthetic
gcgucgggcgccgccgag

SEQ ID NO: 9539 - RNA, 19 nt, Artificial Sequence
  Synthetic
cgcgucgggcgccgccgag

SEQ ID NO: 9540 - RNA, 21 nt, Artificial Sequence
  Synthetic
cccgcgucgggcgccgccgag

SEQ ID NO: 9541 - RNA, 22 nt, Artificial Sequence
  Synthetic
gcccgcgucgggcgccgccgag

SEQ ID NO: 9542 - RNA, 23 nt, Artificial Sequence
  Synthetic
cgcccgcgucgggcgccgccgag

SEQ ID NO: 9543 - RNA, 24 nt, Artificial Sequence
  Synthetic
gcgcccgcgucgggcgccgccgag

SEQ ID NO: 9544 - RNA, 18 nt, Artificial Sequence
  Synthetic
ugccgcguuguccaggag

SEQ ID NO: 9545 - RNA, 19 nt, Artificial Sequence
  Synthetic
cugccgcguuguccaggag

SEQ ID NO: 9546 - RNA, 21 nt, Artificial Sequence
  Synthetic
ggcugccgcguuguccaggag

SEQ ID NO: 9547 - RNA, 22 nt, Artificial Sequence
  Synthetic
cggcugccgcguuguccaggag

SEQ ID NO: 9548 - RNA, 23 nt, Artificial Sequence
  Synthetic
acggcugccgcguuguccaggag

SEQ ID NO: 9549 - RNA, 24 nt, Artificial Sequence
  Synthetic
cacggcugccgcguuguccaggag

SEQ ID NO: 9550 - RNA, 18 nt, Artificial Sequence
  Synthetic
guugcgggcacugcggag

SEQ ID NO: 9551 - RNA, 19 nt, Artificial Sequence
  Synthetic
cguugcgggcacugcggag

SEQ ID NO: 9552 - RNA, 21 nt, Artificial Sequence
  Synthetic
cccguugcgggcacugcggag

SEQ ID NO: 9553 - RNA, 22 nt, Artificial Sequence
  Synthetic
ccccguugcgggcacugcggag

SEQ ID NO: 9554 - RNA, 23 nt, Artificial Sequence
  Synthetic
uccccguugcgggcacugcggag

SEQ ID NO: 9555 - RNA, 24 nt, Artificial Sequence
  Synthetic
uuccccguugcgggcacugcggag

SEQ ID NO: 9556 - RNA, 18 nt, Artificial Sequence
  Synthetic
cagagccagucccuugag

SEQ ID NO: 9557 - RNA, 19 nt, Artificial Sequence
  Synthetic
acagagccagucccuugag

SEQ ID NO: 9558 - RNA, 21 nt, Artificial Sequence
  Synthetic
uuacagagccagucccuugag

SEQ ID NO: 9559 - RNA, 22 nt, Artificial Sequence
  Synthetic
auuacagagccagucccuugag

SEQ ID NO: 9560 - RNA, 23 nt, Artificial Sequence
  Synthetic
uauuacagagccagucccuugag

SEQ ID NO: 9561 - RNA, 24 nt, Artificial Sequence
  Synthetic
uuauuacagagccagucccuugag

SEQ ID NO: 9562 - RNA, 18 nt, Artificial Sequence
  Synthetic
agcggggaugcgucauag

SEQ ID NO: 9563 - RNA, 19 nt, Artificial Sequence
  Synthetic
gagcggggaugcgucauag

SEQ ID NO: 9564 - RNA, 21 nt, Artificial Sequence
  Synthetic
uugagcggggaugcgucauag

SEQ ID NO: 9565 - RNA, 22 nt, Artificial Sequence
  Synthetic
cuugagcggggaugcgucauag

SEQ ID NO: 9566 - RNA, 23 nt, Artificial Sequence
  Synthetic
ccuugagcggggaugcgucauag

SEQ ID NO: 9567 - RNA, 24 nt, Artificial Sequence
  Synthetic
cccuugagcggggaugcgucauag

SEQ ID NO: 9568 - RNA, 18 nt, Artificial Sequence
  Synthetic
agacggggcacggccacg

SEQ ID NO: 9569 - RNA, 19 nt, Artificial Sequence
  Synthetic
cagacggggcacggccacg

SEQ ID NO: 9570 - RNA, 21 nt, Artificial Sequence
  Synthetic
gucagacggggcacggccacg

SEQ ID NO: 9571 - RNA, 22 nt, Artificial Sequence
  Synthetic
cgucagacggggcacggccacg

SEQ ID NO: 9572 - RNA, 23 nt, Artificial Sequence
  Synthetic
gcgucagacggggcacggccacg

SEQ ID NO: 9573 - RNA, 24 nt, Artificial Sequence
  Synthetic
ugcgucagacggggcacggccacg

SEQ ID NO: 9574 - RNA, 18 nt, Artificial Sequence
  Synthetic
ucgcggacgugcugcacg

SEQ ID NO: 9575 - RNA, 19 nt, Artificial Sequence
  Synthetic
cucgcggacgugcugcacg

SEQ ID NO: 9576 - RNA, 21 nt, Artificial Sequence
  Synthetic
cucucgcggacgugcugcacg

SEQ ID NO: 9577 - RNA, 22 nt, Artificial Sequence
  Synthetic
gcucucgcggacgugcugcacg

SEQ ID NO: 9578 - RNA, 23 nt, Artificial Sequence
  Synthetic
cgcucucgcggacgugcugcacg

SEQ ID NO: 9579 - RNA, 24 nt, Artificial Sequence
  Synthetic
gcgcucucgcggacgugcugcacg

SEQ ID NO: 9580 - RNA, 18 nt, Artificial Sequence
  Synthetic
cgguccugucggacgacg

SEQ ID NO: 9581 - RNA, 19 nt, Artificial Sequence
  Synthetic
gcgguccugucggacgacg

SEQ ID NO: 9582 - RNA, 21 nt, Artificial Sequence
  Synthetic
aagcgguccugucggacgacg

SEQ ID NO: 9583 - RNA, 22 nt, Artificial Sequence
  Synthetic
aaagcgguccugucggacgacg

SEQ ID NO: 9584 - RNA, 23 nt, Artificial Sequence
  Synthetic
caaagcgguccugucggacgacg

SEQ ID NO: 9585 - RNA, 24 nt, Artificial Sequence
  Synthetic
acaaagcgguccugucggacgacg

SEQ ID NO: 9586 - RNA, 18 nt, Artificial Sequence
  Synthetic
gcgaacagcgcguggacg

SEQ ID NO: 9587 - RNA, 19 nt, Artificial Sequence
  Synthetic
ggcgaacagcgcguggacg

SEQ ID NO: 9588 - RNA, 21 nt, Artificial Sequence
  Synthetic
ccggcgaacagcgcguggacg

SEQ ID NO: 9589 - RNA, 22 nt, Artificial Sequence
  Synthetic
cccggcgaacagcgcguggacg

SEQ ID NO: 9590 - RNA, 23 nt, Artificial Sequence
  Synthetic
ccccggcgaacagcgcguggacg

SEQ ID NO: 9591 - RNA, 24 nt, Artificial Sequence
  Synthetic
gccccggcgaacagcgcguggacg

SEQ ID NO: 9592 - RNA, 18 nt, Artificial Sequence
  Synthetic
cgguggccguggacaccg

SEQ ID NO: 9593 - RNA, 19 nt, Artificial Sequence
  Synthetic
gcgguggccguggacaccg

SEQ ID NO: 9594 - RNA, 21 nt, Artificial Sequence
  Synthetic
cggcgguggccguggacaccg

SEQ ID NO: 9595 - RNA, 22 nt, Artificial Sequence
  Synthetic
gcggcgguggccguggacaccg

SEQ ID NO: 9596 - RNA, 23 nt, Artificial Sequence
  Synthetic
ggcggcgguggccguggacaccg

SEQ ID NO: 9597 - RNA, 24 nt, Artificial Sequence
  Synthetic
uggcggcgguggccguggacaccg

SEQ ID NO: 9598 - RNA, 18 nt, Artificial Sequence
  Synthetic
agcaggggcugagcaccg

SEQ ID NO: 9599 - RNA, 19 nt, Artificial Sequence
  Synthetic
aagcaggggcugagcaccg

SEQ ID NO: 9600 - RNA, 21 nt, Artificial Sequence
  Synthetic
uaaagcaggggcugagcaccg

SEQ ID NO: 9601 - RNA, 22 nt, Artificial Sequence
  Synthetic
uuaaagcaggggcugagcaccg

SEQ ID NO: 9602 - RNA, 23 nt, Artificial Sequence
  Synthetic
cuuaaagcaggggcugagcaccg

SEQ ID NO: 9603 - RNA, 24 nt, Artificial Sequence
  Synthetic
acuuaaagcaggggcugagcaccg

SEQ ID NO: 9604 - RNA, 18 nt, Artificial Sequence
  Synthetic
cgaguucgcggcaccccg

SEQ ID NO: 9605 - RNA, 19 nt, Artificial Sequence
  Synthetic
acgaguucgcggcaccccg

SEQ ID NO: 9606 - RNA, 21 nt, Artificial Sequence
  Synthetic
ccacgaguucgcggcaccccg

SEQ ID NO: 9607 - RNA, 22 nt, Artificial Sequence
  Synthetic
uccacgaguucgcggcaccccg

SEQ ID NO: 9608 - RNA, 23 nt, Artificial Sequence
  Synthetic
cuccacgaguucgcggcaccccg

SEQ ID NO: 9609 - RNA, 24 nt, Artificial Sequence
  Synthetic
ccuccacgaguucgcggcaccccg

SEQ ID NO: 9610 - RNA, 18 nt, Artificial Sequence
  Synthetic
agcaccggcgaggccccg

SEQ ID NO: 9611 - RNA, 19 nt, Artificial Sequence
  Synthetic
gagcaccggcgaggccccg

SEQ ID NO: 9612 - RNA, 21 nt, Artificial Sequence
  Synthetic
cugagcaccggcgaggccccg

SEQ ID NO: 9613 - RNA, 22 nt, Artificial Sequence
  Synthetic
gcugagcaccggcgaggccccg

SEQ ID NO: 9614 - RNA, 23 nt, Artificial Sequence
  Synthetic
ggcugagcaccggcgaggccccg

SEQ ID NO: 9615 - RNA, 24 nt, Artificial Sequence
  Synthetic
gggcugagcaccggcgaggccccg

SEQ ID NO: 9616 - RNA, 18 nt, Artificial Sequence
  Synthetic
gccacguggucggccccg

SEQ ID NO: 9617 - RNA, 19 nt, Artificial Sequence
  Synthetic
cgccacguggucggccccg

SEQ ID NO: 9618 - RNA, 21 nt, Artificial Sequence
  Synthetic
uucgccacguggucggccccg

SEQ ID NO: 9619 - RNA, 22 nt, Artificial Sequence
  Synthetic
guucgccacguggucggccccg

SEQ ID NO: 9620 - RNA, 23 nt, Artificial Sequence
  Synthetic
cguucgccacguggucggccccg

SEQ ID NO: 9621 - RNA, 24 nt, Artificial Sequence
  Synthetic
gcguucgccacguggucggccccg

SEQ ID NO: 9622 - RNA, 18 nt, Artificial Sequence
  Synthetic
aguuggcccccagagccg

SEQ ID NO: 9623 - RNA, 19 nt, Artificial Sequence
  Synthetic
uaguuggcccccagagccg

SEQ ID NO: 9624 - RNA, 21 nt, Artificial Sequence
  Synthetic
aguaguuggcccccagagccg

SEQ ID NO: 9625 - RNA, 22 nt, Artificial Sequence
  Synthetic
aaguaguuggcccccagagccg

SEQ ID NO: 9626 - RNA, 23 nt, Artificial Sequence
  Synthetic
aaaguaguuggcccccagagccg

SEQ ID NO: 9627 - RNA, 24 nt, Artificial Sequence
  Synthetic
aaaaguaguuggcccccagagccg

SEQ ID NO: 9628 - RNA, 18 nt, Artificial Sequence
  Synthetic
gggcgucccggaacgccg

SEQ ID NO: 9629 - RNA, 19 nt, Artificial Sequence
  Synthetic
cgggcgucccggaacgccg

SEQ ID NO: 9630 - RNA, 21 nt, Artificial Sequence
  Synthetic
cccgggcgucccggaacgccg

SEQ ID NO: 9631 - RNA, 22 nt, Artificial Sequence
  Synthetic
ccccgggcgucccggaacgccg

SEQ ID NO: 9632 - RNA, 23 nt, Artificial Sequence
  Synthetic
gccccgggcgucccggaacgccg

SEQ ID NO: 9633 - RNA, 24 nt, Artificial Sequence
  Synthetic
ggccccgggcgucccggaacgccg

SEQ ID NO: 9634 - RNA, 18 nt, Artificial Sequence
  Synthetic
cgcccgcgucgggcgccg

SEQ ID NO: 9635 - RNA, 19 nt, Artificial Sequence
  Synthetic
gcgcccgcgucgggcgccg

SEQ ID NO: 9636 - RNA, 21 nt, Artificial Sequence
  Synthetic
uggcgcccgcgucgggcgccg

SEQ ID NO: 9637 - RNA, 22 nt, Artificial Sequence
  Synthetic
uuggcgcccgcgucgggcgccg

SEQ ID NO: 9638 - RNA, 23 nt, Artificial Sequence
  Synthetic
guuggcgcccgcgucgggcgccg

SEQ ID NO: 9639 - RNA, 24 nt, Artificial Sequence
  Synthetic
uguuggcgcccgcgucgggcgccg

SEQ ID NO: 9640 - RNA, 18 nt, Artificial Sequence
  Synthetic
aagaccagcuucucgccg

SEQ ID NO: 9641 - RNA, 19 nt, Artificial Sequence
  Synthetic
aaagaccagcuucucgccg

SEQ ID NO: 9642 - RNA, 21 nt, Artificial Sequence
  Synthetic
agaaagaccagcuucucgccg

SEQ ID NO: 9643 - RNA, 22 nt, Artificial Sequence
  Synthetic
cagaaagaccagcuucucgccg

SEQ ID NO: 9644 - RNA, 23 nt, Artificial Sequence
  Synthetic
ccagaaagaccagcuucucgccg

SEQ ID NO: 9645 - RNA, 24 nt, Artificial Sequence
  Synthetic
uccagaaagaccagcuucucgccg

SEQ ID NO: 9646 - RNA, 18 nt, Artificial Sequence
  Synthetic
ucucccccgggccggccg

SEQ ID NO: 9647 - RNA, 19 nt, Artificial Sequence
  Synthetic
aucucccccgggccggccg

SEQ ID NO: 9648 - RNA, 21 nt, Artificial Sequence
  Synthetic
ggaucucccccgggccggccg

SEQ ID NO: 9649 - RNA, 22 nt, Artificial Sequence
  Synthetic
uggaucucccccgggccggccg

SEQ ID NO: 9650 - RNA, 23 nt, Artificial Sequence
  Synthetic
cuggaucucccccgggccggccg

SEQ ID NO: 9651 - RNA, 24 nt, Artificial Sequence
  Synthetic
ccuggaucucccccgggccggccg

SEQ ID NO: 9652 - RNA, 18 nt, Artificial Sequence
  Synthetic
acaggucgcgcagggccg

SEQ ID NO: 9653 - RNA, 19 nt, Artificial Sequence
  Synthetic
gacaggucgcgcagggccg

SEQ ID NO: 9654 - RNA, 21 nt, Artificial Sequence
  Synthetic
gcgacaggucgcgcagggccg

SEQ ID NO: 9655 - RNA, 22 nt, Artificial Sequence
  Synthetic
cgcgacaggucgcgcagggccg

SEQ ID NO: 9656 - RNA, 23 nt, Artificial Sequence
  Synthetic
ccgcgacaggucgcgcagggccg

SEQ ID NO: 9657 - RNA, 24 nt, Artificial Sequence
  Synthetic
gccgcgacaggucgcgcagggccg

SEQ ID NO: 9658 - RNA, 18 nt, Artificial Sequence
  Synthetic
ccggggguugcagggccg

SEQ ID NO: 9659 - RNA, 19 nt, Artificial Sequence
  Synthetic
cccggggguugcagggccg

SEQ ID NO: 9660 - RNA, 21 nt, Artificial Sequence
  Synthetic
uccccggggguugcagggccg

SEQ ID NO: 9661 - RNA, 22 nt, Artificial Sequence
  Synthetic
guccccggggguugcagggccg

SEQ ID NO: 9662 - RNA, 23 nt, Artificial Sequence
  Synthetic
cguccccggggguugcagggccg

SEQ ID NO: 9663 - RNA, 24 nt, Artificial Sequence
  Synthetic
gcguccccggggguugcagggccg

SEQ ID NO: 9664 - RNA, 18 nt, Artificial Sequence
  Synthetic
gcgguguuggcgcccgcg

SEQ ID NO: 9665 - RNA, 19 nt, Artificial Sequence
  Synthetic
cgcgguguuggcgcccgcg

SEQ ID NO: 9666 - RNA, 21 nt, Artificial Sequence
  Synthetic
gacgcgguguuggcgcccgcg

SEQ ID NO: 9667 - RNA, 22 nt, Artificial Sequence
  Synthetic
ggacgcgguguuggcgcccgcg

SEQ ID NO: 9668 - RNA, 23 nt, Artificial Sequence
  Synthetic
uggacgcgguguuggcgcccgcg

SEQ ID NO: 9669 - RNA, 24 nt, Artificial Sequence
  Synthetic
guggacgcgguguuggcgcccgcg

SEQ ID NO: 9670 - RNA, 18 nt, Artificial Sequence
  Synthetic
cugccgcgacaggucgcg

SEQ ID NO: 9671 - RNA, 19 nt, Artificial Sequence
  Synthetic
ccugccgcgacaggucgcg

SEQ ID NO: 9672 - RNA, 21 nt, Artificial Sequence
  Synthetic
gaccugccgcgacaggucgcg

SEQ ID NO: 9673 - RNA, 22 nt, Artificial Sequence
  Synthetic
ggaccugccgcgacaggucgcg

SEQ ID NO: 9674 - RNA, 23 nt, Artificial Sequence
  Synthetic
gggaccugccgcgacaggucgcg

SEQ ID NO: 9675 - RNA, 24 nt, Artificial Sequence
  Synthetic
ggggaccugccgcgacaggucgcg

SEQ ID NO: 9676 - RNA, 18 nt, Artificial Sequence
  Synthetic
uggcggggcgggaaggcg

SEQ ID NO: 9677 - RNA, 19 nt, Artificial Sequence
  Synthetic
cuggcggggcgggaaggcg

SEQ ID NO: 9678 - RNA, 21 nt, Artificial Sequence
  Synthetic
agcuggcggggcgggaaggcg

SEQ ID NO: 9679 - RNA, 22 nt, Artificial Sequence
  Synthetic
cagcuggcggggcgggaaggcg

SEQ ID NO: 9680 - RNA, 23 nt, Artificial Sequence
  Synthetic
acagcuggcggggcgggaaggcg

SEQ ID NO: 9681 - RNA, 24 nt, Artificial Sequence
  Synthetic
aacagcuggcggggcgggaaggcg

SEQ ID NO: 9682 - RNA, 18 nt, Artificial Sequence
  Synthetic
acgagccgggccagggcg

SEQ ID NO: 9683 - RNA, 19 nt, Artificial Sequence
  Synthetic
cacgagccgggccagggcg

SEQ ID NO: 9684 - RNA, 21 nt, Artificial Sequence
  Synthetic
accacgagccgggccagggcg

SEQ ID NO: 9685 - RNA, 22 nt, Artificial Sequence
  Synthetic
gaccacgagccgggccagggcg

SEQ ID NO: 9686 - RNA, 23 nt, Artificial Sequence
  Synthetic
ggaccacgagccgggccagggcg

SEQ ID NO: 9687 - RNA, 24 nt, Artificial Sequence
  Synthetic
uggaccacgagccgggccagggcg

SEQ ID NO: 9688 - RNA, 18 nt, Artificial Sequence
  Synthetic
cccguugcgggcacugcg

SEQ ID NO: 9689 - RNA, 19 nt, Artificial Sequence
  Synthetic
ccccguugcgggcacugcg

SEQ ID NO: 9690 - RNA, 21 nt, Artificial Sequence
  Synthetic
uuccccguugcgggcacugcg

SEQ ID NO: 9691 - RNA, 22 nt, Artificial Sequence
  Synthetic
cuuccccguugcgggcacugcg

SEQ ID NO: 9692 - RNA, 23 nt, Artificial Sequence
  Synthetic
gcuuccccguugcgggcacugcg

SEQ ID NO: 9693 - RNA, 24 nt, Artificial Sequence
  Synthetic
ggcuuccccguugcgggcacugcg

SEQ ID NO: 9694 - RNA, 18 nt, Artificial Sequence
  Synthetic
agcugcugcaugucugcg

SEQ ID NO: 9695 - RNA, 19 nt, Artificial Sequence
  Synthetic
cagcugcugcaugucugcg

SEQ ID NO: 9696 - RNA, 21 nt, Artificial Sequence
  Synthetic
aacagcugcugcaugucugcg

SEQ ID NO: 9697 - RNA, 22 nt, Artificial Sequence
  Synthetic
aaacagcugcugcaugucugcg

SEQ ID NO: 9698 - RNA, 23 nt, Artificial Sequence
  Synthetic
aaaacagcugcugcaugucugcg

SEQ ID NO: 9699 - RNA, 24 nt, Artificial Sequence
  Synthetic
aaaaacagcugcugcaugucugcg

SEQ ID NO: 9700 - RNA, 18 nt, Artificial Sequence
  Synthetic
cgacgggcugucggaucg

SEQ ID NO: 9701 - RNA, 19 nt, Artificial Sequence
  Synthetic
acgacgggcugucggaucg

SEQ ID NO: 9702 - RNA, 21 nt, Artificial Sequence
  Synthetic
gcacgacgggcugucggaucg

SEQ ID NO: 9703 - RNA, 22 nt, Artificial Sequence
  Synthetic
ugcacgacgggcugucggaucg

SEQ ID NO: 9704 - RNA, 23 nt, Artificial Sequence
  Synthetic
cugcacgacgggcugucggaucg

SEQ ID NO: 9705 - RNA, 24 nt, Artificial Sequence
  Synthetic
gcugcacgacgggcugucggaucg

SEQ ID NO: 9706 - RNA, 18 nt, Artificial Sequence
  Synthetic
ucgcuggggcacuccucg

SEQ ID NO: 9707 - RNA, 19 nt, Artificial Sequence
  Synthetic
gucgcuggggcacuccucg

SEQ ID NO: 9708 - RNA, 21 nt, Artificial Sequence
  Synthetic
gggucgcuggggcacuccucg

SEQ ID NO: 9709 - RNA, 22 nt, Artificial Sequence
  Synthetic
ggggucgcuggggcacuccucg

SEQ ID NO: 9710 - RNA, 23 nt, Artificial Sequence
  Synthetic
cggggucgcuggggcacuccucg

SEQ ID NO: 9711 - RNA, 24 nt, Artificial Sequence
  Synthetic
acggggucgcuggggcacuccucg

SEQ ID NO: 9712 - RNA, 18 nt, Artificial Sequence
  Synthetic
aggaaaaagcucgucucg

SEQ ID NO: 9713 - RNA, 19 nt, Artificial Sequence
  Synthetic
caggaaaaagcucgucucg

SEQ ID NO: 9714 - RNA, 21 nt, Artificial Sequence
  Synthetic
cccaggaaaaagcucgucucg

SEQ ID NO: 9715 - RNA, 22 nt, Artificial Sequence
  Synthetic
gcccaggaaaaagcucgucucg

SEQ ID NO: 9716 - RNA, 23 nt, Artificial Sequence
  Synthetic
ugcccaggaaaaagcucgucucg

SEQ ID NO: 9717 - RNA, 24 nt, Artificial Sequence
  Synthetic
uugcccaggaaaaagcucgucucg

SEQ ID NO: 9718 - RNA, 18 nt, Artificial Sequence
  Synthetic
gccggguaguugcggucg

SEQ ID NO: 9719 - RNA, 19 nt, Artificial Sequence
  Synthetic
cgccggguaguugcggucg

SEQ ID NO: 9720 - RNA, 21 nt, Artificial Sequence
  Synthetic
accgccggguaguugcggucg

SEQ ID NO: 9721 - RNA, 22 nt, Artificial Sequence
  Synthetic
caccgccggguaguugcggucg

SEQ ID NO: 9722 - RNA, 23 nt, Artificial Sequence
  Synthetic
acaccgccggguaguugcggucg

SEQ ID NO: 9723 - RNA, 24 nt, Artificial Sequence
  Synthetic
aacaccgccggguaguugcggucg

SEQ ID NO: 9724 - RNA, 18 nt, Artificial Sequence
  Synthetic
ggguccgucacggggucg

SEQ ID NO: 9725 - RNA, 19 nt, Artificial Sequence
  Synthetic
gggguccgucacggggucg

SEQ ID NO: 9726 - RNA, 21 nt, Artificial Sequence
  Synthetic
gcgggguccgucacggggucg

SEQ ID NO: 9727 - RNA, 22 nt, Artificial Sequence
  Synthetic
cgcgggguccgucacggggucg

SEQ ID NO: 9728 - RNA, 23 nt, Artificial Sequence
  Synthetic
gcgcgggguccgucacggggucg

SEQ ID NO: 9729 - RNA, 24 nt, Artificial Sequence
  Synthetic
ugcgcgggguccgucacggggucg

SEQ ID NO: 9730 - RNA, 18 nt, Artificial Sequence
  Synthetic
uacggauuggcggcuucg

SEQ ID NO: 9731 - RNA, 19 nt, Artificial Sequence
  Synthetic
guacggauuggcggcuucg

SEQ ID NO: 9732 - RNA, 21 nt, Artificial Sequence
  Synthetic
ccguacggauuggcggcuucg

SEQ ID NO: 9733 - RNA, 22 nt, Artificial Sequence
  Synthetic
cccguacggauuggcggcuucg

SEQ ID NO: 9734 - RNA, 23 nt, Artificial Sequence
  Synthetic
ccccguacggauuggcggcuucg

SEQ ID NO: 9735 - RNA, 24 nt, Artificial Sequence
  Synthetic
gccccguacggauuggcggcuucg

SEQ ID NO: 9736 - RNA, 18 nt, Artificial Sequence
  Synthetic
aacaggcccaggggcagg

SEQ ID NO: 9737 - RNA, 19 nt, Artificial Sequence
  Synthetic
gaacaggcccaggggcagg

SEQ ID NO: 9738 - RNA, 21 nt, Artificial Sequence
  Synthetic
uugaacaggcccaggggcagg

SEQ ID NO: 9739 - RNA, 22 nt, Artificial Sequence
  Synthetic
auugaacaggcccaggggcagg

SEQ ID NO: 9740 - RNA, 23 nt, Artificial Sequence
  Synthetic
gauugaacaggcccaggggcagg

SEQ ID NO: 9741 - RNA, 24 nt, Artificial Sequence
  Synthetic
ggauugaacaggcccaggggcagg

SEQ ID NO: 9742 - RNA, 18 nt, Artificial Sequence
  Synthetic
agcgucugccgguucagg

SEQ ID NO: 9743 - RNA, 19 nt, Artificial Sequence
  Synthetic
cagcgucugccgguucagg

SEQ ID NO: 9744 - RNA, 21 nt, Artificial Sequence
  Synthetic
uccagcgucugccgguucagg

SEQ ID NO: 9745 - RNA, 22 nt, Artificial Sequence
  Synthetic
guccagcgucugccgguucagg

SEQ ID NO: 9746 - RNA, 23 nt, Artificial Sequence
  Synthetic
cguccagcgucugccgguucagg

SEQ ID NO: 9747 - RNA, 24 nt, Artificial Sequence
  Synthetic
ucguccagcgucugccgguucagg

SEQ ID NO: 9748 - RNA, 18 nt, Artificial Sequence
  Synthetic
guguccuccacuuucagg

SEQ ID NO: 9749 - RNA, 19 nt, Artificial Sequence
  Synthetic
gguguccuccacuuucagg

SEQ ID NO: 9750 - RNA, 21 nt, Artificial Sequence
  Synthetic
ucgguguccuccacuuucagg

SEQ ID NO: 9751 - RNA, 22 nt, Artificial Sequence
  Synthetic
uucgguguccuccacuuucagg

SEQ ID NO: 9752 - RNA, 23 nt, Artificial Sequence
  Synthetic
cuucgguguccuccacuuucagg

SEQ ID NO: 9753 - RNA, 24 nt, Artificial Sequence
  Synthetic
gcuucgguguccuccacuuucagg

SEQ ID NO: 9754 - RNA, 18 nt, Artificial Sequence
  Synthetic
cgcguuguccaggagagg

SEQ ID NO: 9755 - RNA, 19 nt, Artificial Sequence
  Synthetic
ccgcguuguccaggagagg

SEQ ID NO: 9756 - RNA, 21 nt, Artificial Sequence
  Synthetic
ugccgcguuguccaggagagg

SEQ ID NO: 9757 - RNA, 22 nt, Artificial Sequence
  Synthetic
cugccgcguuguccaggagagg

SEQ ID NO: 9758 - RNA, 23 nt, Artificial Sequence
  Synthetic
gcugccgcguuguccaggagagg

SEQ ID NO: 9759 - RNA, 24 nt, Artificial Sequence
  Synthetic
ggcugccgcguuguccaggagagg

SEQ ID NO: 9760 - RNA, 18 nt, Artificial Sequence
  Synthetic
cgggcacugcggaggagg

SEQ ID NO: 9761 - RNA, 19 nt, Artificial Sequence
  Synthetic
gcgggcacugcggaggagg

SEQ ID NO: 9762 - RNA, 21 nt, Artificial Sequence
  Synthetic
uugcgggcacugcggaggagg

SEQ ID NO: 9763 - RNA, 22 nt, Artificial Sequence
  Synthetic
guugcgggcacugcggaggagg

SEQ ID NO: 9764 - RNA, 23 nt, Artificial Sequence
  Synthetic
cguugcgggcacugcggaggagg

SEQ ID NO: 9765 - RNA, 24 nt, Artificial Sequence
  Synthetic
ccguugcgggcacugcggaggagg

SEQ ID NO: 9766 - RNA, 18 nt, Artificial Sequence
  Synthetic
guuggcccccagagccgg

SEQ ID NO: 9767 - RNA, 19 nt, Artificial Sequence
  Synthetic
aguuggcccccagagccgg

SEQ ID NO: 9768 - RNA, 21 nt, Artificial Sequence
  Synthetic
guaguuggcccccagagccgg

SEQ ID NO: 9769 - RNA, 22 nt, Artificial Sequence
  Synthetic
aguaguuggcccccagagccgg

SEQ ID NO: 9770 - RNA, 23 nt, Artificial Sequence
  Synthetic
aaguaguuggcccccagagccgg

SEQ ID NO: 9771 - RNA, 24 nt, Artificial Sequence
  Synthetic
aaaguaguuggcccccagagccgg

SEQ ID NO: 9772 - RNA, 18 nt, Artificial Sequence
  Synthetic
cucccccgggccggccgg

SEQ ID NO: 9773 - RNA, 19 nt, Artificial Sequence
  Synthetic
ucucccccgggccggccgg

SEQ ID NO: 9774 - RNA, 21 nt, Artificial Sequence
  Synthetic
gaucucccccgggccggccgg

SEQ ID NO: 9775 - RNA, 22 nt, Artificial Sequence
  Synthetic
ggaucucccccgggccggccgg

SEQ ID NO: 9776 - RNA, 23 nt, Artificial Sequence
  Synthetic
uggaucucccccgggccggccgg

SEQ ID NO: 9777 - RNA, 24 nt, Artificial Sequence
  Synthetic
cuggaucucccccgggccggccgg

SEQ ID NO: 9778 - RNA, 18 nt, Artificial Sequence
  Synthetic
caggucgcgcagggccgg

SEQ ID NO: 9779 - RNA, 19 nt, Artificial Sequence
  Synthetic
acaggucgcgcagggccgg

SEQ ID NO: 9780 - RNA, 21 nt, Artificial Sequence
  Synthetic
cgacaggucgcgcagggccgg

SEQ ID NO: 9781 - RNA, 22 nt, Artificial Sequence
  Synthetic
gcgacaggucgcgcagggccgg

SEQ ID NO: 9782 - RNA, 23 nt, Artificial Sequence
  Synthetic
cgcgacaggucgcgcagggccgg

SEQ ID NO: 9783 - RNA, 24 nt, Artificial Sequence
  Synthetic
ccgcgacaggucgcgcagggccgg

SEQ ID NO: 9784 - RNA, 18 nt, Artificial Sequence
  Synthetic
cggggguugcagggccgg

SEQ ID NO: 9785 - RNA, 19 nt, Artificial Sequence
  Synthetic
ccggggguugcagggccgg

SEQ ID NO: 9786 - RNA, 21 nt, Artificial Sequence
  Synthetic
ccccggggguugcagggccgg

SEQ ID NO: 9787 - RNA, 22 nt, Artificial Sequence
  Synthetic
uccccggggguugcagggccgg

SEQ ID NO: 9788 - RNA, 23 nt, Artificial Sequence
  Synthetic
guccccggggguugcagggccgg

SEQ ID NO: 9789 - RNA, 24 nt, Artificial Sequence
  Synthetic
cguccccggggguugcagggccgg

SEQ ID NO: 9790 - RNA, 18 nt, Artificial Sequence
  Synthetic
ggaucucccccgggccgg

SEQ ID NO: 9791 - RNA, 19 nt, Artificial Sequence
  Synthetic
uggaucucccccgggccgg

SEQ ID NO: 9792 - RNA, 21 nt, Artificial Sequence
  Synthetic
ccuggaucucccccgggccgg

SEQ ID NO: 9793 - RNA, 22 nt, Artificial Sequence
  Synthetic
gccuggaucucccccgggccgg

SEQ ID NO: 9794 - RNA, 23 nt, Artificial Sequence
  Synthetic
ggccuggaucucccccgggccgg

SEQ ID NO: 9795 - RNA, 24 nt, Artificial Sequence
  Synthetic
uggccuggaucucccccgggccgg

SEQ ID NO: 9796 - RNA, 18 nt, Artificial Sequence
  Synthetic
ugucugcggcggggccgg

SEQ ID NO: 9797 - RNA, 19 nt, Artificial Sequence
  Synthetic
augucugcggcggggccgg

SEQ ID NO: 9798 - RNA, 21 nt, Artificial Sequence
  Synthetic
gcaugucugcggcggggccgg

SEQ ID NO: 9799 - RNA, 22 nt, Artificial Sequence
  Synthetic
ugcaugucugcggcggggccgg

SEQ ID NO: 9800 - RNA, 23 nt, Artificial Sequence
  Synthetic
cugcaugucugcggcggggccgg

SEQ ID NO: 9801 - RNA, 24 nt, Artificial Sequence
  Synthetic
gcugcaugucugcggcggggccgg

SEQ ID NO: 9802 - RNA, 18 nt, Artificial Sequence
  Synthetic
aggguggcguauacgcgg

SEQ ID NO: 9803 - RNA, 19 nt, Artificial Sequence
  Synthetic
caggguggcguauacgcgg

SEQ ID NO: 9804 - RNA, 21 nt, Artificial Sequence
  Synthetic
ugcaggguggcguauacgcgg

SEQ ID NO: 9805 - RNA, 22 nt, Artificial Sequence
  Synthetic
cugcaggguggcguauacgcgg

SEQ ID NO: 9806 - RNA, 23 nt, Artificial Sequence
  Synthetic
ucugcaggguggcguauacgcgg

SEQ ID NO: 9807 - RNA, 24 nt, Artificial Sequence
  Synthetic
uucugcaggguggcguauacgcgg

SEQ ID NO: 9808 - RNA, 18 nt, Artificial Sequence
  Synthetic
ccguugcgggcacugcgg

SEQ ID NO: 9809 - RNA, 19 nt, Artificial Sequence
  Synthetic
cccguugcgggcacugcgg

SEQ ID NO: 9810 - RNA, 21 nt, Artificial Sequence
  Synthetic
uccccguugcgggcacugcgg

SEQ ID NO: 9811 - RNA, 22 nt, Artificial Sequence
  Synthetic
uuccccguugcgggcacugcgg

SEQ ID NO: 9812 - RNA, 23 nt, Artificial Sequence
  Synthetic
cuuccccguugcgggcacugcgg

SEQ ID NO: 9813 - RNA, 24 nt, Artificial Sequence
  Synthetic
gcuuccccguugcgggcacugcgg

SEQ ID NO: 9814 - RNA, 18 nt, Artificial Sequence
  Synthetic
gcugcugcaugucugcgg

SEQ ID NO: 9815 - RNA, 19 nt, Artificial Sequence
  Synthetic
agcugcugcaugucugcgg

SEQ ID NO: 9816 - RNA, 21 nt, Artificial Sequence
  Synthetic
acagcugcugcaugucugcgg

SEQ ID NO: 9817 - RNA, 22 nt, Artificial Sequence
  Synthetic
aacagcugcugcaugucugcgg

SEQ ID NO: 9818 - RNA, 23 nt, Artificial Sequence
  Synthetic
aaacagcugcugcaugucugcgg

SEQ ID NO: 9819 - RNA, 24 nt, Artificial Sequence
  Synthetic
aaaacagcugcugcaugucugcgg

SEQ ID NO: 9820 - RNA, 18 nt, Artificial Sequence
  Synthetic
agcuggccgucguugcgg

SEQ ID NO: 9821 - RNA, 19 nt, Artificial Sequence
  Synthetic
cagcuggccgucguugcgg

SEQ ID NO: 9822 - RNA, 21 nt, Artificial Sequence
  Synthetic
agcagcuggccgucguugcgg

SEQ ID NO: 9823 - RNA, 22 nt, Artificial Sequence
  Synthetic
cagcagcuggccgucguugcgg

SEQ ID NO: 9824 - RNA, 23 nt, Artificial Sequence
  Synthetic
gcagcagcuggccgucguugcgg

SEQ ID NO: 9825 - RNA, 24 nt, Artificial Sequence
  Synthetic
ugcagcagcuggccgucguugcgg

SEQ ID NO: 9826 - RNA, 18 nt, Artificial Sequence
  Synthetic
gcgacaggucgcgcaggg

SEQ ID NO: 9827 - RNA, 19 nt, Artificial Sequence
  Synthetic
cgcgacaggucgcgcaggg

SEQ ID NO: 9828 - RNA, 21 nt, Artificial Sequence
  Synthetic
gccgcgacaggucgcgcaggg

SEQ ID NO: 9829 - RNA, 22 nt, Artificial Sequence
  Synthetic
ugccgcgacaggucgcgcaggg

SEQ ID NO: 9830 - RNA, 23 nt, Artificial Sequence
  Synthetic
cugccgcgacaggucgcgcaggg

SEQ ID NO: 9831 - RNA, 24 nt, Artificial Sequence
  Synthetic
ccugccgcgacaggucgcgcaggg

SEQ ID NO: 9832 - RNA, 18 nt, Artificial Sequence
  Synthetic
cccgaacacggggacggg

SEQ ID NO: 9833 - RNA, 19 nt, Artificial Sequence
  Synthetic
acccgaacacggggacggg

SEQ ID NO: 9834 - RNA, 21 nt, Artificial Sequence
  Synthetic
gcacccgaacacggggacggg

SEQ ID NO: 9835 - RNA, 22 nt, Artificial Sequence
  Synthetic
cgcacccgaacacggggacggg

SEQ ID NO: 9836 - RNA, 23 nt, Artificial Sequence
  Synthetic
gcgcacccgaacacggggacggg

SEQ ID NO: 9837 - RNA, 24 nt, Artificial Sequence
  Synthetic
ggcgcacccgaacacggggacggg

SEQ ID NO: 9838 - RNA, 18 nt, Artificial Sequence
  Synthetic
gaacagcgcguggacggg

SEQ ID NO: 9839 - RNA, 19 nt, Artificial Sequence
  Synthetic
cgaacagcgcguggacggg

SEQ ID NO: 9840 - RNA, 21 nt, Artificial Sequence
  Synthetic
ggcgaacagcgcguggacggg

SEQ ID NO: 9841 - RNA, 22 nt, Artificial Sequence
  Synthetic
cggcgaacagcgcguggacggg

SEQ ID NO: 9842 - RNA, 23 nt, Artificial Sequence
  Synthetic
ccggcgaacagcgcguggacggg

SEQ ID NO: 9843 - RNA, 24 nt, Artificial Sequence
  Synthetic
cccggcgaacagcgcguggacggg

SEQ ID NO: 9844 - RNA, 18 nt, Artificial Sequence
  Synthetic
ggugaacccaaacccggg

SEQ ID NO: 9845 - RNA, 19 nt, Artificial Sequence
  Synthetic
cggugaacccaaacccggg

SEQ ID NO: 9846 - RNA, 21 nt, Artificial Sequence
  Synthetic
gacggugaacccaaacccggg

SEQ ID NO: 9847 - RNA, 22 nt, Artificial Sequence
  Synthetic
cgacggugaacccaaacccggg

SEQ ID NO: 9848 - RNA, 23 nt, Artificial Sequence
  Synthetic
acgacggugaacccaaacccggg

SEQ ID NO: 9849 - RNA, 24 nt, Artificial Sequence
  Synthetic
gacgacggugaacccaaacccggg

SEQ ID NO: 9850 - RNA, 18 nt, Artificial Sequence
  Synthetic
aggucgcgcagggccggg

SEQ ID NO: 9851 - RNA, 19 nt, Artificial Sequence
  Synthetic
caggucgcgcagggccggg

SEQ ID NO: 9852 - RNA, 21 nt, Artificial Sequence
  Synthetic
gacaggucgcgcagggccggg

SEQ ID NO: 9853 - RNA, 22 nt, Artificial Sequence
  Synthetic
cgacaggucgcgcagggccggg

SEQ ID NO: 9854 - RNA, 23 nt, Artificial Sequence
  Synthetic
gcgacaggucgcgcagggccggg

SEQ ID NO: 9855 - RNA, 24 nt, Artificial Sequence
  Synthetic
cgcgacaggucgcgcagggccggg

SEQ ID NO: 9856 - RNA, 18 nt, Artificial Sequence
  Synthetic
aaaaaaacagcuggcggg

SEQ ID NO: 9857 - RNA, 19 nt, Artificial Sequence
  Synthetic
caaaaaaacagcuggcggg

SEQ ID NO: 9858 - RNA, 21 nt, Artificial Sequence
  Synthetic
cccaaaaaaacagcuggcggg

SEQ ID NO: 9859 - RNA, 22 nt, Artificial Sequence
  Synthetic
ccccaaaaaaacagcuggcggg

SEQ ID NO: 9860 - RNA, 23 nt, Artificial Sequence
  Synthetic
cccccaaaaaaacagcuggcggg

SEQ ID NO: 9861 - RNA, 24 nt, Artificial Sequence
  Synthetic
ucccccaaaaaaacagcuggcggg

SEQ ID NO: 9862 - RNA, 18 nt, Artificial Sequence
  Synthetic
auugaacaggcccagggg

SEQ ID NO: 9863 - RNA, 19 nt, Artificial Sequence
  Synthetic
gauugaacaggcccagggg

SEQ ID NO: 9864 - RNA, 21 nt, Artificial Sequence
  Synthetic
cggauugaacaggcccagggg

SEQ ID NO: 9865 - RNA, 22 nt, Artificial Sequence
  Synthetic
ccggauugaacaggcccagggg

SEQ ID NO: 9866 - RNA, 23 nt, Artificial Sequence
  Synthetic
accggauugaacaggcccagggg

SEQ ID NO: 9867 - RNA, 24 nt, Artificial Sequence
  Synthetic
gaccggauugaacaggcccagggg

SEQ ID NO: 9868 - RNA, 18 nt, Artificial Sequence
  Synthetic
aagaacuuaaagcagggg

SEQ ID NO: 9869 - RNA, 19 nt, Artificial Sequence
  Synthetic
aaagaacuuaaagcagggg

SEQ ID NO: 9870 - RNA, 21 nt, Artificial Sequence
  Synthetic
guaaagaacuuaaagcagggg

SEQ ID NO: 9871 - RNA, 22 nt, Artificial Sequence
  Synthetic
cguaaagaacuuaaagcagggg

SEQ ID NO: 9872 - RNA, 23 nt, Artificial Sequence
  Synthetic
acguaaagaacuuaaagcagggg

SEQ ID NO: 9873 - RNA, 24 nt, Artificial Sequence
  Synthetic
gacguaaagaacuuaaagcagggg

SEQ ID NO: 9874 - RNA, 18 nt, Artificial Sequence
  Synthetic
gcgcacccgaacacgggg

SEQ ID NO: 9875 - RNA, 19 nt, Artificial Sequence
  Synthetic
ggcgcacccgaacacgggg

SEQ ID NO: 9876 - RNA, 21 nt, Artificial Sequence
  Synthetic
ugggcgcacccgaacacgggg

SEQ ID NO: 9877 - RNA, 22 nt, Artificial Sequence
  Synthetic
cugggcgcacccgaacacgggg

SEQ ID NO: 9878 - RNA, 23 nt, Artificial Sequence
  Synthetic
ccugggcgcacccgaacacgggg

SEQ ID NO: 9879 - RNA, 24 nt, Artificial Sequence
  Synthetic
accugggcgcacccgaacacgggg

SEQ ID NO: 9880 - RNA, 18 nt, Artificial Sequence
  Synthetic
aacagcgcguggacgggg

SEQ ID NO: 9881 - RNA, 19 nt, Artificial Sequence
  Synthetic
gaacagcgcguggacgggg

SEQ ID NO: 9882 - RNA, 21 nt, Artificial Sequence
  Synthetic
gcgaacagcgcguggacgggg

SEQ ID NO: 9883 - RNA, 22 nt, Artificial Sequence
  Synthetic
ggcgaacagcgcguggacgggg

SEQ ID NO: 9884 - RNA, 23 nt, Artificial Sequence
  Synthetic
cggcgaacagcgcguggacgggg

SEQ ID NO: 9885 - RNA, 24 nt, Artificial Sequence
  Synthetic
ccggcgaacagcgcguggacgggg

SEQ ID NO: 9886 - RNA, 18 nt, Artificial Sequence
  Synthetic
ggauccggguggccgggg

SEQ ID NO: 9887 - RNA, 19 nt, Artificial Sequence
  Synthetic
gggauccggguggccgggg

SEQ ID NO: 9888 - RNA, 21 nt, Artificial Sequence
  Synthetic
cggggauccggguggccgggg

SEQ ID NO: 9889 - RNA, 22 nt, Artificial Sequence
  Synthetic
gcggggauccggguggccgggg

SEQ ID NO: 9890 - RNA, 23 nt, Artificial Sequence
  Synthetic
cgcggggauccggguggccgggg

SEQ ID NO: 9891 - RNA, 24 nt, Artificial Sequence
  Synthetic
gcgcggggauccggguggccgggg

SEQ ID NO: 9892 - RNA, 18 nt, Artificial Sequence
  Synthetic
aaaaaacagcuggcgggg

SEQ ID NO: 9893 - RNA, 19 nt, Artificial Sequence
  Synthetic
aaaaaaacagcuggcgggg

SEQ ID NO: 9894 - RNA, 21 nt, Artificial Sequence
  Synthetic
ccaaaaaaacagcuggcgggg

SEQ ID NO: 9895 - RNA, 22 nt, Artificial Sequence
  Synthetic
cccaaaaaaacagcuggcgggg

SEQ ID NO: 9896 - RNA, 23 nt, Artificial Sequence
  Synthetic
ccccaaaaaaacagcuggcgggg

SEQ ID NO: 9897 - RNA, 24 nt, Artificial Sequence
  Synthetic
cccccaaaaaaacagcuggcgggg

SEQ ID NO: 9898 - RNA, 18 nt, Artificial Sequence
  Synthetic
auggcgcccaccaggggg

SEQ ID NO: 9899 - RNA, 19 nt, Artificial Sequence
  Synthetic
cauggcgcccaccaggggg

SEQ ID NO: 9900 - RNA, 21 nt, Artificial Sequence
  Synthetic
uccauggcgcccaccaggggg

SEQ ID NO: 9901 - RNA, 22 nt, Artificial Sequence
  Synthetic
guccauggcgcccaccaggggg

SEQ ID NO: 9902 - RNA, 23 nt, Artificial Sequence
  Synthetic
gguccauggcgcccaccaggggg

SEQ ID NO: 9903 - RNA, 24 nt, Artificial Sequence
  Synthetic
agguccauggcgcccaccaggggg

SEQ ID NO: 9904 - RNA, 18 nt, Artificial Sequence
  Synthetic
gauccggguggccggggg

SEQ ID NO: 9905 - RNA, 19 nt, Artificial Sequence
  Synthetic
ggauccggguggccggggg

SEQ ID NO: 9906 - RNA, 21 nt, Artificial Sequence
  Synthetic
ggggauccggguggccggggg

SEQ ID NO: 9907 - RNA, 22 nt, Artificial Sequence
  Synthetic
cggggauccggguggccggggg

SEQ ID NO: 9908 - RNA, 23 nt, Artificial Sequence
  Synthetic
gcggggauccggguggccggggg

SEQ ID NO: 9909 - RNA, 24 nt, Artificial Sequence
  Synthetic
cgcggggauccggguggccggggg

SEQ ID NO: 9910 - RNA, 18 nt, Artificial Sequence
  Synthetic
ccccaaaaaaacagcugg

SEQ ID NO: 9911 - RNA, 19 nt, Artificial Sequence
  Synthetic
cccccaaaaaaacagcugg

SEQ ID NO: 9912 - RNA, 21 nt, Artificial Sequence
  Synthetic
uucccccaaaaaaacagcugg

SEQ ID NO: 9913 - RNA, 22 nt, Artificial Sequence
  Synthetic
cuucccccaaaaaaacagcugg

SEQ ID NO: 9914 - RNA, 23 nt, Artificial Sequence
  Synthetic
ccuucccccaaaaaaacagcugg

SEQ ID NO: 9915 - RNA, 24 nt, Artificial Sequence
  Synthetic
uccuucccccaaaaaaacagcugg

SEQ ID NO: 9916 - RNA, 18 nt, Artificial Sequence
  Synthetic
acguucgcgcgcggcugg

SEQ ID NO: 9917 - RNA, 19 nt, Artificial Sequence
  Synthetic
cacguucgcgcgcggcugg

SEQ ID NO: 9918 - RNA, 21 nt, Artificial Sequence
  Synthetic
uccacguucgcgcgcggcugg

SEQ ID NO: 9919 - RNA, 22 nt, Artificial Sequence
  Synthetic
guccacguucgcgcgcggcugg

SEQ ID NO: 9920 - RNA, 23 nt, Artificial Sequence
  Synthetic
gguccacguucgcgcgcggcugg

SEQ ID NO: 9921 - RNA, 24 nt, Artificial Sequence
  Synthetic
agguccacguucgcgcgcggcugg

SEQ ID NO: 9922 - RNA, 18 nt, Artificial Sequence
  Synthetic
ccggcgaacagcgcgugg

SEQ ID NO: 9923 - RNA, 19 nt, Artificial Sequence
  Synthetic
cccggcgaacagcgcgugg

SEQ ID NO: 9924 - RNA, 21 nt, Artificial Sequence
  Synthetic
gccccggcgaacagcgcgugg

SEQ ID NO: 9925 - RNA, 22 nt, Artificial Sequence
  Synthetic
ggccccggcgaacagcgcgugg

SEQ ID NO: 9926 - RNA, 23 nt, Artificial Sequence
  Synthetic
cggccccggcgaacagcgcgugg

SEQ ID NO: 9927 - RNA, 24 nt, Artificial Sequence
  Synthetic
ucggccccggcgaacagcgcgugg

SEQ ID NO: 9928 - RNA, 18 nt, Artificial Sequence
  Synthetic
gcgcggggauccgggugg

SEQ ID NO: 9929 - RNA, 19 nt, Artificial Sequence
  Synthetic
ggcgcggggauccgggugg

SEQ ID NO: 9930 - RNA, 21 nt, Artificial Sequence
  Synthetic
aaggcgcggggauccgggugg

SEQ ID NO: 9931 - RNA, 22 nt, Artificial Sequence
  Synthetic
gaaggcgcggggauccgggugg

SEQ ID NO: 9932 - RNA, 23 nt, Artificial Sequence
  Synthetic
ggaaggcgcggggauccgggugg

SEQ ID NO: 9933 - RNA, 24 nt, Artificial Sequence
  Synthetic
gggaaggcgcggggauccgggugg

SEQ ID NO: 9934 - RNA, 18 nt, Artificial Sequence
  Synthetic
gaacggcggcgauggugg

SEQ ID NO: 9935 - RNA, 19 nt, Artificial Sequence
  Synthetic
cgaacggcggcgauggugg

SEQ ID NO: 9936 - RNA, 21 nt, Artificial Sequence
  Synthetic
cgcgaacggcggcgauggugg

SEQ ID NO: 9937 - RNA, 22 nt, Artificial Sequence
  Synthetic
ccgcgaacggcggcgauggugg

SEQ ID NO: 9938 - RNA, 23 nt, Artificial Sequence
  Synthetic
cccgcgaacggcggcgauggugg

SEQ ID NO: 9939 - RNA, 24 nt, Artificial Sequence
  Synthetic
ccccgcgaacggcggcgauggugg

SEQ ID NO: 9940 - RNA, 18 nt, Artificial Sequence
  Synthetic
accugcagcgugagcaug

SEQ ID NO: 9941 - RNA, 19 nt, Artificial Sequence
  Synthetic
caccugcagcgugagcaug

SEQ ID NO: 9942 - RNA, 21 nt, Artificial Sequence
  Synthetic
agcaccugcagcgugagcaug

SEQ ID NO: 9943 - RNA, 22 nt, Artificial Sequence
  Synthetic
cagcaccugcagcgugagcaug

SEQ ID NO: 9944 - RNA, 23 nt, Artificial Sequence
  Synthetic
ccagcaccugcagcgugagcaug

SEQ ID NO: 9945 - RNA, 24 nt, Artificial Sequence
  Synthetic
gccagcaccugcagcgugagcaug

SEQ ID NO: 9946 - RNA, 18 nt, Artificial Sequence
  Synthetic
gaugguaugguccagaug

SEQ ID NO: 9947 - RNA, 19 nt, Artificial Sequence
  Synthetic
ggaugguaugguccagaug

SEQ ID NO: 9948 - RNA, 21 nt, Artificial Sequence
  Synthetic
uuggaugguaugguccagaug

SEQ ID NO: 9949 - RNA, 22 nt, Artificial Sequence
  Synthetic
uuuggaugguaugguccagaug

SEQ ID NO: 9950 - RNA, 23 nt, Artificial Sequence
  Synthetic
uuuuggaugguaugguccagaug

SEQ ID NO: 9951 - RNA, 24 nt, Artificial Sequence
  Synthetic
auuuuggaugguaugguccagaug

SEQ ID NO: 9952 - RNA, 18 nt, Artificial Sequence
  Synthetic
uccccguugcgggcacug

SEQ ID NO: 9953 - RNA, 19 nt, Artificial Sequence
  Synthetic
uuccccguugcgggcacug

SEQ ID NO: 9954 - RNA, 21 nt, Artificial Sequence
  Synthetic
gcuuccccguugcgggcacug

SEQ ID NO: 9955 - RNA, 22 nt, Artificial Sequence
  Synthetic
ggcuuccccguugcgggcacug

SEQ ID NO: 9956 - RNA, 23 nt, Artificial Sequence
  Synthetic
gggcuuccccguugcgggcacug

SEQ ID NO: 9957 - RNA, 24 nt, Artificial Sequence
  Synthetic
ugggcuuccccguugcgggcacug

SEQ ID NO: 9958 - RNA, 18 nt, Artificial Sequence
  Synthetic
cacuuucaggaaggacug

SEQ ID NO: 9959 - RNA, 19 nt, Artificial Sequence
  Synthetic
ccacuuucaggaaggacug

SEQ ID NO: 9960 - RNA, 21 nt, Artificial Sequence
  Synthetic
cuccacuuucaggaaggacug

SEQ ID NO: 9961 - RNA, 22 nt, Artificial Sequence
  Synthetic
ccuccacuuucaggaaggacug

SEQ ID NO: 9962 - RNA, 23 nt, Artificial Sequence
  Synthetic
uccuccacuuucaggaaggacug

SEQ ID NO: 9963 - RNA, 24 nt, Artificial Sequence
  Synthetic
guccuccacuuucaggaaggacug

SEQ ID NO: 9964 - RNA, 18 nt, Artificial Sequence
  Synthetic
agucacaaagcgguccug

SEQ ID NO: 9965 - RNA, 19 nt, Artificial Sequence
  Synthetic
cagucacaaagcgguccug

SEQ ID NO: 9966 - RNA, 21 nt, Artificial Sequence
  Synthetic
cucagucacaaagcgguccug

SEQ ID NO: 9967 - RNA, 22 nt, Artificial Sequence
  Synthetic
ucucagucacaaagcgguccug

SEQ ID NO: 9968 - RNA, 23 nt, Artificial Sequence
  Synthetic
uucucagucacaaagcgguccug

SEQ ID NO: 9969 - RNA, 24 nt, Artificial Sequence
  Synthetic
guucucagucacaaagcgguccug

SEQ ID NO: 9970 - RNA, 18 nt, Artificial Sequence
  Synthetic
cccccaaaaaaacagcug

SEQ ID NO: 9971 - RNA, 19 nt, Artificial Sequence
  Synthetic
ucccccaaaaaaacagcug

SEQ ID NO: 9972 - RNA, 21 nt, Artificial Sequence
  Synthetic
cuucccccaaaaaaacagcug

SEQ ID NO: 9973 - RNA, 22 nt, Artificial Sequence
  Synthetic
ccuucccccaaaaaaacagcug

SEQ ID NO: 9974 - RNA, 23 nt, Artificial Sequence
  Synthetic
uccuucccccaaaaaaacagcug

SEQ ID NO: 9975 - RNA, 24 nt, Artificial Sequence
  Synthetic
guccuucccccaaaaaaacagcug

SEQ ID NO: 9976 - RNA, 18 nt, Artificial Sequence
  Synthetic
gguaugguccagaugcug

SEQ ID NO: 9977 - RNA, 19 nt, Artificial Sequence
  Synthetic
ugguaugguccagaugcug

SEQ ID NO: 9978 - RNA, 21 nt, Artificial Sequence
  Synthetic
gaugguaugguccagaugcug

SEQ ID NO: 9979 - RNA, 22 nt, Artificial Sequence
  Synthetic
ggaugguaugguccagaugcug

SEQ ID NO: 9980 - RNA, 23 nt, Artificial Sequence
  Synthetic
uggaugguaugguccagaugcug

SEQ ID NO: 9981 - RNA, 24 nt, Artificial Sequence
  Synthetic
uuggaugguaugguccagaugcug

SEQ ID NO: 9982 - RNA, 18 nt, Artificial Sequence
  Synthetic
gcgcacgcgcgucgucug

SEQ ID NO: 9983 - RNA, 19 nt, Artificial Sequence
  Synthetic
cgcgcacgcgcgucgucug

SEQ ID NO: 9984 - RNA, 21 nt, Artificial Sequence
  Synthetic
cgcgcgcacgcgcgucgucug

SEQ ID NO: 9985 - RNA, 22 nt, Artificial Sequence
  Synthetic
ccgcgcgcacgcgcgucgucug

SEQ ID NO: 9986 - RNA, 23 nt, Artificial Sequence
  Synthetic
uccgcgcgcacgcgcgucgucug

SEQ ID NO: 9987 - RNA, 24 nt, Artificial Sequence
  Synthetic
auccgcgcgcacgcgcgucgucug

SEQ ID NO: 9988 - RNA, 18 nt, Artificial Sequence
  Synthetic
gagggcugcguggccgug

SEQ ID NO: 9989 - RNA, 19 nt, Artificial Sequence
  Synthetic
ggagggcugcguggccgug

SEQ ID NO: 9990 - RNA, 21 nt, Artificial Sequence
  Synthetic
acggagggcugcguggccgug

SEQ ID NO: 9991 - RNA, 22 nt, Artificial Sequence
  Synthetic
cacggagggcugcguggccgug

SEQ ID NO: 9992 - RNA, 23 nt, Artificial Sequence
  Synthetic
ccacggagggcugcguggccgug

SEQ ID NO: 9993 - RNA, 24 nt, Artificial Sequence
  Synthetic
gccacggagggcugcguggccgug

SEQ ID NO: 9994 - RNA, 18 nt, Artificial Sequence
  Synthetic
ccccccgccaguuucgug

SEQ ID NO: 9995 - RNA, 19 nt, Artificial Sequence
  Synthetic
cccccccgccaguuucgug

SEQ ID NO: 9996 - RNA, 21 nt, Artificial Sequence
  Synthetic
uacccccccgccaguuucgug

SEQ ID NO: 9997 - RNA, 22 nt, Artificial Sequence
  Synthetic
uuacccccccgccaguuucgug

SEQ ID NO: 9998 - RNA, 23 nt, Artificial Sequence
  Synthetic
uuuacccccccgccaguuucgug

SEQ ID NO: 9999 - RNA, 24 nt, Artificial Sequence
  Synthetic
guuuacccccccgccaguuucgug

SEQ ID NO: 10000 - RNA, 18 nt, Artificial Sequence
  Synthetic
agguugcccaugucggug

SEQ ID NO: 10001 - RNA, 19 nt, Artificial Sequence
  Synthetic
aagguugcccaugucggug

SEQ ID NO: 10002 - RNA, 21 nt, Artificial Sequence
  Synthetic
ggaagguugcccaugucggug

SEQ ID NO: 10003 - RNA, 22 nt, Artificial Sequence
  Synthetic
gggaagguugcccaugucggug

SEQ ID NO: 10004 - RNA, 23 nt, Artificial Sequence
  Synthetic
ggggaagguugcccaugucggug

SEQ ID NO: 10005 - RNA, 24 nt, Artificial Sequence
  Synthetic
uggggaagguugcccaugucggug

SEQ ID NO: 10006 - RNA, 18 nt, Artificial Sequence
  Synthetic
caccagauuggccgggug

SEQ ID NO: 10007 - RNA, 19 nt, Artificial Sequence
  Synthetic
ccaccagauuggccgggug

SEQ ID NO: 10008 - RNA, 21 nt, Artificial Sequence
  Synthetic
ggccaccagauuggccgggug

SEQ ID NO: 10009 - RNA, 22 nt, Artificial Sequence
  Synthetic
uggccaccagauuggccgggug

SEQ ID NO: 10010 - RNA, 23 nt, Artificial Sequence
  Synthetic
uuggccaccagauuggccgggug

SEQ ID NO: 10011 - RNA, 24 nt, Artificial Sequence
  Synthetic
guuggccaccagauuggccgggug

SEQ ID NO: 10012 - RNA, 18 nt, Artificial Sequence
  Synthetic
cgaacggcggcgauggug

SEQ ID NO: 10013 - RNA, 19 nt, Artificial Sequence
  Synthetic
gcgaacggcggcgauggug

SEQ ID NO: 10014 - RNA, 21 nt, Artificial Sequence
  Synthetic
ccgcgaacggcggcgauggug

SEQ ID NO: 10015 - RNA, 22 nt, Artificial Sequence
  Synthetic
cccgcgaacggcggcgauggug

SEQ ID NO: 10016 - RNA, 23 nt, Artificial Sequence
  Synthetic
ccccgcgaacggcggcgauggug

SEQ ID NO: 10017 - RNA, 24 nt, Artificial Sequence
  Synthetic
gccccgcgaacggcggcgauggug

SEQ ID NO: 10018 - RNA, 18 nt, Artificial Sequence
  Synthetic
uugaucggggcgguggug

SEQ ID NO: 10019 - RNA, 19 nt, Artificial Sequence
  Synthetic
uuugaucggggcgguggug

SEQ ID NO: 10020 - RNA, 21 nt, Artificial Sequence
  Synthetic
uguuugaucggggcgguggug

SEQ ID NO: 10021 - RNA, 22 nt, Artificial Sequence
  Synthetic
cuguuugaucggggcgguggug

SEQ ID NO: 10022 - RNA, 23 nt, Artificial Sequence
  Synthetic
gcuguuugaucggggcgguggug

SEQ ID NO: 10023 - RNA, 24 nt, Artificial Sequence
  Synthetic
cgcuguuugaucggggcgguggug

SEQ ID NO: 10024 - RNA, 18 nt, Artificial Sequence
  Synthetic
aauaugcgcauguuggug

SEQ ID NO: 10025 - RNA, 19 nt, Artificial Sequence
  Synthetic
gaauaugcgcauguuggug

SEQ ID NO: 10026 - RNA, 21 nt, Artificial Sequence
  Synthetic
ucgaauaugcgcauguuggug

SEQ ID NO: 10027 - RNA, 22 nt, Artificial Sequence
  Synthetic
gucgaauaugcgcauguuggug

SEQ ID NO: 10028 - RNA, 23 nt, Artificial Sequence
  Synthetic
cgucgaauaugcgcauguuggug

SEQ ID NO: 10029 - RNA, 24 nt, Artificial Sequence
  Synthetic
ccgucgaauaugcgcauguuggug

SEQ ID NO: 10030 - RNA, 18 nt, Artificial Sequence
  Synthetic
agagccagguuggcguug

SEQ ID NO: 10031 - RNA, 19 nt, Artificial Sequence
  Synthetic
aagagccagguuggcguug

SEQ ID NO: 10032 - RNA, 21 nt, Artificial Sequence
  Synthetic
ucaagagccagguuggcguug

SEQ ID NO: 10033 - RNA, 22 nt, Artificial Sequence
  Synthetic
cucaagagccagguuggcguug

SEQ ID NO: 10034 - RNA, 23 nt, Artificial Sequence
  Synthetic
gcucaagagccagguuggcguug

SEQ ID NO: 10035 - RNA, 24 nt, Artificial Sequence
  Synthetic
agcucaagagccagguuggcguug

SEQ ID NO: 10036 - RNA, 18 nt, Artificial Sequence
  Synthetic
gcgcguccccggggguug

SEQ ID NO: 10037 - RNA, 19 nt, Artificial Sequence
  Synthetic
ggcgcguccccggggguug

SEQ ID NO: 10038 - RNA, 21 nt, Artificial Sequence
  Synthetic
gcggcgcguccccggggguug

SEQ ID NO: 10039 - RNA, 22 nt, Artificial Sequence
  Synthetic
ggcggcgcguccccggggguug

SEQ ID NO: 10040 - RNA, 23 nt, Artificial Sequence
  Synthetic
cggcggcgcguccccggggguug

SEQ ID NO: 10041 - RNA, 24 nt, Artificial Sequence
  Synthetic
ccggcggcgcguccccggggguug

SEQ ID NO: 10042 - RNA, 18 nt, Artificial Sequence
  Synthetic
gcccagguaaaaguuuug

SEQ ID NO: 10043 - RNA, 19 nt, Artificial Sequence
  Synthetic
ggcccagguaaaaguuuug

SEQ ID NO: 10044 - RNA, 21 nt, Artificial Sequence
  Synthetic
gcggcccagguaaaaguuuug

SEQ ID NO: 10045 - RNA, 22 nt, Artificial Sequence
  Synthetic
cgcggcccagguaaaaguuuug

SEQ ID NO: 10046 - RNA, 23 nt, Artificial Sequence
  Synthetic
ccgcggcccagguaaaaguuuug

SEQ ID NO: 10047 - RNA, 24 nt, Artificial Sequence
  Synthetic
cccgcggcccagguaaaaguuuug

SEQ ID NO: 10048 - RNA, 18 nt, Artificial Sequence
  Synthetic
cuggccguggucguacau

SEQ ID NO: 10049 - RNA, 19 nt, Artificial Sequence
  Synthetic
ucuggccguggucguacau

SEQ ID NO: 10050 - RNA, 21 nt, Artificial Sequence
  Synthetic
gcucuggccguggucguacau

SEQ ID NO: 10051 - RNA, 22 nt, Artificial Sequence
  Synthetic
cgcucuggccguggucguacau

SEQ ID NO: 10052 - RNA, 23 nt, Artificial Sequence
  Synthetic
ucgcucuggccguggucguacau

SEQ ID NO: 10053 - RNA, 24 nt, Artificial Sequence
  Synthetic
gucgcucuggccguggucguacau

SEQ ID NO: 10054 - RNA, 18 nt, Artificial Sequence
  Synthetic
cagggccgcgcgccgcau

SEQ ID NO: 10055 - RNA, 19 nt, Artificial Sequence
  Synthetic
ccagggccgcgcgccgcau

SEQ ID NO: 10056 - RNA, 21 nt, Artificial Sequence
  Synthetic
guccagggccgcgcgccgcau

SEQ ID NO: 10057 - RNA, 22 nt, Artificial Sequence
  Synthetic
gguccagggccgcgcgccgcau

SEQ ID NO: 10058 - RNA, 23 nt, Artificial Sequence
  Synthetic
cgguccagggccgcgcgccgcau

SEQ ID NO: 10059 - RNA, 24 nt, Artificial Sequence
  Synthetic
gcgguccagggccgcgcgccgcau

SEQ ID NO: 10060 - RNA, 18 nt, Artificial Sequence
  Synthetic
caggaggcgcuguuugau

SEQ ID NO: 10061 - RNA, 19 nt, Artificial Sequence
  Synthetic
gcaggaggcgcuguuugau

SEQ ID NO: 10062 - RNA, 21 nt, Artificial Sequence
  Synthetic
cugcaggaggcgcuguuugau

SEQ ID NO: 10063 - RNA, 22 nt, Artificial Sequence
  Synthetic
acugcaggaggcgcuguuugau

SEQ ID NO: 10064 - RNA, 23 nt, Artificial Sequence
  Synthetic
gacugcaggaggcgcuguuugau

SEQ ID NO: 10065 - RNA, 24 nt, Artificial Sequence
  Synthetic
ggacugcaggaggcgcuguuugau

SEQ ID NO: 10066 - RNA, 18 nt, Artificial Sequence
  Synthetic
uuccccguugcgggcacu

SEQ ID NO: 10067 - RNA, 19 nt, Artificial Sequence
  Synthetic
cuuccccguugcgggcacu

SEQ ID NO: 10068 - RNA, 21 nt, Artificial Sequence
  Synthetic
ggcuuccccguugcgggcacu

SEQ ID NO: 10069 - RNA, 22 nt, Artificial Sequence
  Synthetic
gggcuuccccguugcgggcacu

SEQ ID NO: 10070 - RNA, 23 nt, Artificial Sequence
  Synthetic
ugggcuuccccguugcgggcacu

SEQ ID NO: 10071 - RNA, 24 nt, Artificial Sequence
  Synthetic
gugggcuuccccguugcgggcacu

SEQ ID NO: 10072 - RNA, 18 nt, Artificial Sequence
  Synthetic
acacggccaugcacuccu

SEQ ID NO: 10073 - RNA, 19 nt, Artificial Sequence
  Synthetic
uacacggccaugcacuccu

SEQ ID NO: 10074 - RNA, 21 nt, Artificial Sequence
  Synthetic
gguacacggccaugcacuccu

SEQ ID NO: 10075 - RNA, 22 nt, Artificial Sequence
  Synthetic
cgguacacggccaugcacuccu

SEQ ID NO: 10076 - RNA, 23 nt, Artificial Sequence
  Synthetic
ccgguacacggccaugcacuccu

SEQ ID NO: 10077 - RNA, 24 nt, Artificial Sequence
  Synthetic
cccgguacacggccaugcacuccu

SEQ ID NO: 10078 - RNA, 18 nt, Artificial Sequence
  Synthetic
gcgccugcccgcccagcu

SEQ ID NO: 10079 - RNA, 19 nt, Artificial Sequence
  Synthetic
ugcgccugcccgcccagcu

SEQ ID NO: 10080 - RNA, 21 nt, Artificial Sequence
  Synthetic
cuugcgccugcccgcccagcu

SEQ ID NO: 10081 - RNA, 22 nt, Artificial Sequence
  Synthetic
gcuugcgccugcccgcccagcu

SEQ ID NO: 10082 - RNA, 23 nt, Artificial Sequence
  Synthetic
ggcuugcgccugcccgcccagcu

SEQ ID NO: 10083 - RNA, 24 nt, Artificial Sequence
  Synthetic
cggcuugcgccugcccgcccagcu

SEQ ID NO: 10084 - RNA, 18 nt, Artificial Sequence
  Synthetic
acgccuccgacgcgcgcu

SEQ ID NO: 10085 - RNA, 19 nt, Artificial Sequence
  Synthetic
uacgccuccgacgcgcgcu

SEQ ID NO: 10086 - RNA, 21 nt, Artificial Sequence
  Synthetic
aguacgccuccgacgcgcgcu

SEQ ID NO: 10087 - RNA, 22 nt, Artificial Sequence
  Synthetic
aaguacgccuccgacgcgcgcu

SEQ ID NO: 10088 - RNA, 23 nt, Artificial Sequence
  Synthetic
gaaguacgccuccgacgcgcgcu

SEQ ID NO: 10089 - RNA, 24 nt, Artificial Sequence
  Synthetic
ggaaguacgccuccgacgcgcgcu

SEQ ID NO: 10090 - RNA, 18 nt, Artificial Sequence
  Synthetic
ugguaugguccagaugcu

SEQ ID NO: 10091 - RNA, 19 nt, Artificial Sequence
  Synthetic
augguaugguccagaugcu

SEQ ID NO: 10092 - RNA, 21 nt, Artificial Sequence
  Synthetic
ggaugguaugguccagaugcu

SEQ ID NO: 10093 - RNA, 22 nt, Artificial Sequence
  Synthetic
uggaugguaugguccagaugcu

SEQ ID NO: 10094 - RNA, 23 nt, Artificial Sequence
  Synthetic
uuggaugguaugguccagaugcu

SEQ ID NO: 10095 - RNA, 24 nt, Artificial Sequence
  Synthetic
uuuggaugguaugguccagaugcu

SEQ ID NO: 10096 - RNA, 18 nt, Artificial Sequence
  Synthetic
cgggcugcauaaacugcu

SEQ ID NO: 10097 - RNA, 19 nt, Artificial Sequence
  Synthetic
ucgggcugcauaaacugcu

SEQ ID NO: 10098 - RNA, 21 nt, Artificial Sequence
  Synthetic
ugucgggcugcauaaacugcu

SEQ ID NO: 10099 - RNA, 22 nt, Artificial Sequence
  Synthetic
uugucgggcugcauaaacugcu

SEQ ID NO: 10100 - RNA, 23 nt, Artificial Sequence
  Synthetic
guugucgggcugcauaaacugcu

SEQ ID NO: 10101 - RNA, 24 nt, Artificial Sequence
  Synthetic
cguugucgggcugcauaaacugcu

SEQ ID NO: 10102 - RNA, 18 nt, Artificial Sequence
  Synthetic
ccucgccgggggcgaucu

SEQ ID NO: 10103 - RNA, 19 nt, Artificial Sequence
  Synthetic
uccucgccgggggcgaucu

SEQ ID NO: 10104 - RNA, 21 nt, Artificial Sequence
  Synthetic
acuccucgccgggggcgaucu

SEQ ID NO: 10105 - RNA, 22 nt, Artificial Sequence
  Synthetic
cacuccucgccgggggcgaucu

SEQ ID NO: 10106 - RNA, 23 nt, Artificial Sequence
  Synthetic
gcacuccucgccgggggcgaucu

SEQ ID NO: 10107 - RNA, 24 nt, Artificial Sequence
  Synthetic
ggcacuccucgccgggggcgaucu

SEQ ID NO: 10108 - RNA, 18 nt, Artificial Sequence
  Synthetic
cgcgcacgcgcgucgucu

SEQ ID NO: 10109 - RNA, 19 nt, Artificial Sequence
  Synthetic
gcgcgcacgcgcgucgucu

SEQ ID NO: 10110 - RNA, 21 nt, Artificial Sequence
  Synthetic
ccgcgcgcacgcgcgucgucu

SEQ ID NO: 10111 - RNA, 22 nt, Artificial Sequence
  Synthetic
uccgcgcgcacgcgcgucgucu

SEQ ID NO: 10112 - RNA, 23 nt, Artificial Sequence
  Synthetic
auccgcgcgcacgcgcgucgucu

SEQ ID NO: 10113 - RNA, 24 nt, Artificial Sequence
  Synthetic
gauccgcgcgcacgcgcgucgucu

SEQ ID NO: 10114 - RNA, 18 nt, Artificial Sequence
  Synthetic
cgagguaggucacgacgu

SEQ ID NO: 10115 - RNA, 19 nt, Artificial Sequence
  Synthetic
ccgagguaggucacgacgu

SEQ ID NO: 10116 - RNA, 21 nt, Artificial Sequence
  Synthetic
ccccgagguaggucacgacgu

SEQ ID NO: 10117 - RNA, 22 nt, Artificial Sequence
  Synthetic
cccccgagguaggucacgacgu

SEQ ID NO: 10118 - RNA, 23 nt, Artificial Sequence
  Synthetic
ucccccgagguaggucacgacgu

SEQ ID NO: 10119 - RNA, 24 nt, Artificial Sequence
  Synthetic
cucccccgagguaggucacgacgu

SEQ ID NO: 10120 - RNA, 18 nt, Artificial Sequence
  Synthetic
uauagagcagguccccgu

SEQ ID NO: 10121 - RNA, 19 nt, Artificial Sequence
  Synthetic
uuauagagcagguccccgu

SEQ ID NO: 10122 - RNA, 21 nt, Artificial Sequence
  Synthetic
cguuauagagcagguccccgu

SEQ ID NO: 10123 - RNA, 22 nt, Artificial Sequence
  Synthetic
ccguuauagagcagguccccgu

SEQ ID NO: 10124 - RNA, 23 nt, Artificial Sequence
  Synthetic
cccguuauagagcagguccccgu

SEQ ID NO: 10125 - RNA, 24 nt, Artificial Sequence
  Synthetic
ccccguuauagagcagguccccgu

SEQ ID NO: 10126 - RNA, 18 nt, Artificial Sequence
  Synthetic
cgcgcgcacgcgcgucgu

SEQ ID NO: 10127 - RNA, 19 nt, Artificial Sequence
  Synthetic
ccgcgcgcacgcgcgucgu

SEQ ID NO: 10128 - RNA, 21 nt, Artificial Sequence
  Synthetic
auccgcgcgcacgcgcgucgu

SEQ ID NO: 10129 - RNA, 22 nt, Artificial Sequence
  Synthetic
gauccgcgcgcacgcgcgucgu

SEQ ID NO: 10130 - RNA, 23 nt, Artificial Sequence
  Synthetic
agauccgcgcgcacgcgcgucgu

SEQ ID NO: 10131 - RNA, 24 nt, Artificial Sequence
  Synthetic
cagauccgcgcgcacgcgcgucgu

SEQ ID NO: 10132 - RNA, 18 nt, Artificial Sequence
  Synthetic
uggcgcccaccagggggu

SEQ ID NO: 10133 - RNA, 19 nt, Artificial Sequence
  Synthetic
auggcgcccaccagggggu

SEQ ID NO: 10134 - RNA, 21 nt, Artificial Sequence
  Synthetic
ccauggcgcccaccagggggu

SEQ ID NO: 10135 - RNA, 22 nt, Artificial Sequence
  Synthetic
uccauggcgcccaccagggggu

SEQ ID NO: 10136 - RNA, 23 nt, Artificial Sequence
  Synthetic
guccauggcgcccaccagggggu

SEQ ID NO: 10137 - RNA, 24 nt, Artificial Sequence
  Synthetic
gguccauggcgcccaccagggggu

SEQ ID NO: 10138 - RNA, 18 nt, Artificial Sequence
  Synthetic
gcggcccagguaaaaguu

SEQ ID NO: 10139 - RNA, 19 nt, Artificial Sequence
  Synthetic
cgcggcccagguaaaaguu

SEQ ID NO: 10140 - RNA, 21 nt, Artificial Sequence
  Synthetic
cccgcggcccagguaaaaguu

SEQ ID NO: 10141 - RNA, 22 nt, Artificial Sequence
  Synthetic
ccccgcggcccagguaaaaguu

SEQ ID NO: 10142 - RNA, 23 nt, Artificial Sequence
  Synthetic
gccccgcggcccagguaaaaguu

SEQ ID NO: 10143 - RNA, 24 nt, Artificial Sequence
  Synthetic
agccccgcggcccagguaaaaguu

SEQ ID NO: 10144 - RNA, 18 nt, Artificial Sequence
  Synthetic
gaccagguuggccccguu

SEQ ID NO: 10145 - RNA, 19 nt, Artificial Sequence
  Synthetic
ugaccagguuggccccguu

SEQ ID NO: 10146 - RNA, 21 nt, Artificial Sequence
  Synthetic
cgugaccagguuggccccguu

SEQ ID NO: 10147 - RNA, 22 nt, Artificial Sequence
  Synthetic
ccgugaccagguuggccccguu

SEQ ID NO: 10148 - RNA, 23 nt, Artificial Sequence
  Synthetic
gccgugaccagguuggccccguu

SEQ ID NO: 10149 - RNA, 24 nt, Artificial Sequence
  Synthetic
cgccgugaccagguuggccccguu

SEQ ID NO: 10150 - RNA, 18 nt, Artificial Sequence
  Synthetic
cgcgugggcuuccccguu

SEQ ID NO: 10151 - RNA, 19 nt, Artificial Sequence
  Synthetic
gcgcgugggcuuccccguu

SEQ ID NO: 10152 - RNA, 21 nt, Artificial Sequence
  Synthetic
ccgcgcgugggcuuccccguu

SEQ ID NO: 10153 - RNA, 22 nt, Artificial Sequence
  Synthetic
cccgcgcgugggcuuccccguu

SEQ ID NO: 10154 - RNA, 23 nt, Artificial Sequence
  Synthetic
ucccgcgcgugggcuuccccguu

SEQ ID NO: 10155 - RNA, 24 nt, Artificial Sequence
  Synthetic
cucccgcgcgugggcuuccccguu

SEQ ID NO: 10156 - RNA, 18 nt, Artificial Sequence
  Synthetic
cacuaccacgcgcccguu

SEQ ID NO: 10157 - RNA, 19 nt, Artificial Sequence
  Synthetic
ccacuaccacgcgcccguu

SEQ ID NO: 10158 - RNA, 21 nt, Artificial Sequence
  Synthetic
guccacuaccacgcgcccguu

SEQ ID NO: 10159 - RNA, 22 nt, Artificial Sequence
  Synthetic
cguccacuaccacgcgcccguu

SEQ ID NO: 10160 - RNA, 23 nt, Artificial Sequence
  Synthetic
ccguccacuaccacgcgcccguu

SEQ ID NO: 10161 - RNA, 24 nt, Artificial Sequence
  Synthetic
cccguccacuaccacgcgcccguu

SEQ ID NO: 10162 - RNA, 18 nt, Artificial Sequence
  Synthetic
caugucggugacgggguu

SEQ ID NO: 10163 - RNA, 19 nt, Artificial Sequence
  Synthetic
ccaugucggugacgggguu

SEQ ID NO: 10164 - RNA, 21 nt, Artificial Sequence
  Synthetic
gcccaugucggugacgggguu

SEQ ID NO: 10165 - RNA, 22 nt, Artificial Sequence
  Synthetic
ugcccaugucggugacgggguu

SEQ ID NO: 10166 - RNA, 23 nt, Artificial Sequence
  Synthetic
uugcccaugucggugacgggguu

SEQ ID NO: 10167 - RNA, 24 nt, Artificial Sequence
  Synthetic
guugcccaugucggugacgggguu

SEQ ID NO: 10168 - RNA, 18 nt, Artificial Sequence
  Synthetic
ugugcguucggccauguu

SEQ ID NO: 10169 - RNA, 19 nt, Artificial Sequence
  Synthetic
uugugcguucggccauguu

SEQ ID NO: 10170 - RNA, 21 nt, Artificial Sequence
  Synthetic
cguugugcguucggccauguu

SEQ ID NO: 10171 - RNA, 22 nt, Artificial Sequence
  Synthetic
ccguugugcguucggccauguu

SEQ ID NO: 10172 - RNA, 23 nt, Artificial Sequence
  Synthetic
gccguugugcguucggccauguu

SEQ ID NO: 10173 - RNA, 24 nt, Artificial Sequence
  Synthetic
cgccguugugcguucggccauguu

SEQ ID NO: 10174 - RNA, 18 nt, Artificial Sequence
  Synthetic
uucgguguccuccacuuu

SEQ ID NO: 10175 - RNA, 19 nt, Artificial Sequence
  Synthetic
cuucgguguccuccacuuu

SEQ ID NO: 10176 - RNA, 21 nt, Artificial Sequence
  Synthetic
ggcuucgguguccuccacuuu

SEQ ID NO: 10177 - RNA, 22 nt, Artificial Sequence
  Synthetic
cggcuucgguguccuccacuuu

SEQ ID NO: 10178 - RNA, 23 nt, Artificial Sequence
  Synthetic
ucggcuucgguguccuccacuuu

SEQ ID NO: 10179 - RNA, 24 nt, Artificial Sequence
  Synthetic
gucggcuucgguguccuccacuuu

SEQ ID NO: 10180 - RNA, 18 nt, Artificial Sequence
  Synthetic
cggcccagguaaaaguuu

SEQ ID NO: 10181 - RNA, 19 nt, Artificial Sequence
  Synthetic
gcggcccagguaaaaguuu

SEQ ID NO: 10182 - RNA, 21 nt, Artificial Sequence
  Synthetic
ccgcggcccagguaaaaguuu

SEQ ID NO: 10183 - RNA, 22 nt, Artificial Sequence
  Synthetic
cccgcggcccagguaaaaguuu

SEQ ID NO: 10184 - RNA, 23 nt, Artificial Sequence
  Synthetic
ccccgcggcccagguaaaaguuu

SEQ ID NO: 10185 - RNA, 24 nt, Artificial Sequence
  Synthetic
gccccgcggcccagguaaaaguuu

SEQ ID NO: 10186 - RNA, 18 nt, Artificial Sequence
  Synthetic
ggcccagguaaaaguuuu

SEQ ID NO: 10187 - RNA, 19 nt, Artificial Sequence
  Synthetic
cggcccagguaaaaguuuu

SEQ ID NO: 10188 - RNA, 21 nt, Artificial Sequence
  Synthetic
cgcggcccagguaaaaguuuu

SEQ ID NO: 10189 - RNA, 22 nt, Artificial Sequence
  Synthetic
ccgcggcccagguaaaaguuuu

SEQ ID NO: 10190 - RNA, 23 nt, Artificial Sequence
  Synthetic
cccgcggcccagguaaaaguuuu

SEQ ID NO: 10191 - RNA, 24 nt, Artificial Sequence
  Synthetic
ccccgcggcccagguaaaaguuuu

SEQ ID NO: 10192 - RNA, 18 nt, Artificial Sequence
  Synthetic
cugcaguccuuccugaaa

SEQ ID NO: 10193 - RNA, 19 nt, Artificial Sequence
  Synthetic
ccugcaguccuuccugaaa

SEQ ID NO: 10194 - RNA, 21 nt, Artificial Sequence
  Synthetic
cuccugcaguccuuccugaaa

SEQ ID NO: 10195 - RNA, 22 nt, Artificial Sequence
  Synthetic
ccuccugcaguccuuccugaaa

SEQ ID NO: 10196 - RNA, 23 nt, Artificial Sequence
  Synthetic
gccuccugcaguccuuccugaaa

SEQ ID NO: 10197 - RNA, 24 nt, Artificial Sequence
  Synthetic
cgccuccugcaguccuuccugaaa

SEQ ID NO: 10198 - RNA, 18 nt, Artificial Sequence
  Synthetic
ccuggucgccgagcuaaa

SEQ ID NO: 10199 - RNA, 19 nt, Artificial Sequence
  Synthetic
cccuggucgccgagcuaaa

SEQ ID NO: 10200 - RNA, 21 nt, Artificial Sequence
  Synthetic
gacccuggucgccgagcuaaa

SEQ ID NO: 10201 - RNA, 22 nt, Artificial Sequence
  Synthetic
cgacccuggucgccgagcuaaa

SEQ ID NO: 10202 - RNA, 23 nt, Artificial Sequence
  Synthetic
gcgacccuggucgccgagcuaaa

SEQ ID NO: 10203 - RNA, 24 nt, Artificial Sequence
  Synthetic
ggcgacccuggucgccgagcuaaa

SEQ ID NO: 10204 - RNA, 18 nt, Artificial Sequence
  Synthetic
ccuccgcagugcccgcaa

SEQ ID NO: 10205 - RNA, 19 nt, Artificial Sequence
  Synthetic
uccuccgcagugcccgcaa

SEQ ID NO: 10206 - RNA, 21 nt, Artificial Sequence
  Synthetic
ccuccuccgcagugcccgcaa

SEQ ID NO: 10207 - RNA, 22 nt, Artificial Sequence
  Synthetic
cccuccuccgcagugcccgcaa

SEQ ID NO: 10208 - RNA, 23 nt, Artificial Sequence
  Synthetic
gcccuccuccgcagugcccgcaa

SEQ ID NO: 10209 - RNA, 24 nt, Artificial Sequence
  Synthetic
cgcccuccuccgcagugcccgcaa

SEQ ID NO: 10210 - RNA, 18 nt, Artificial Sequence
  Synthetic
cggggccuaccaccucaa

SEQ ID NO: 10211 - RNA, 19 nt, Artificial Sequence
  Synthetic
acggggccuaccaccucaa

SEQ ID NO: 10212 - RNA, 21 nt, Artificial Sequence
  Synthetic
uaacggggccuaccaccucaa

SEQ ID NO: 10213 - RNA, 22 nt, Artificial Sequence
  Synthetic
auaacggggccuaccaccucaa

SEQ ID NO: 10214 - RNA, 23 nt, Artificial Sequence
  Synthetic
uauaacggggccuaccaccucaa

SEQ ID NO: 10215 - RNA, 24 nt, Artificial Sequence
  Synthetic
cuauaacggggccuaccaccucaa

SEQ ID NO: 10216 - RNA, 18 nt, Artificial Sequence
  Synthetic
cggcgagaugguccugaa

SEQ ID NO: 10217 - RNA, 19 nt, Artificial Sequence
  Synthetic
acggcgagaugguccugaa

SEQ ID NO: 10218 - RNA, 21 nt, Artificial Sequence
  Synthetic
guacggcgagaugguccugaa

SEQ ID NO: 10219 - RNA, 22 nt, Artificial Sequence
  Synthetic
cguacggcgagaugguccugaa

SEQ ID NO: 10220 - RNA, 23 nt, Artificial Sequence
  Synthetic
acguacggcgagaugguccugaa

SEQ ID NO: 10221 - RNA, 24 nt, Artificial Sequence
  Synthetic
gacguacggcgagaugguccugaa

SEQ ID NO: 10222 - RNA, 18 nt, Artificial Sequence
  Synthetic
cggggaccugcucuauaa

SEQ ID NO: 10223 - RNA, 19 nt, Artificial Sequence
  Synthetic
acggggaccugcucuauaa

SEQ ID NO: 10224 - RNA, 21 nt, Artificial Sequence
  Synthetic
guacggggaccugcucuauaa

SEQ ID NO: 10225 - RNA, 22 nt, Artificial Sequence
  Synthetic
cguacggggaccugcucuauaa

SEQ ID NO: 10226 - RNA, 23 nt, Artificial Sequence
  Synthetic
ucguacggggaccugcucuauaa

SEQ ID NO: 10227 - RNA, 24 nt, Artificial Sequence
  Synthetic
uucguacggggaccugcucuauaa

SEQ ID NO: 10228 - RNA, 18 nt, Artificial Sequence
  Synthetic
ucaacgccauguuucaca

SEQ ID NO: 10229 - RNA, 19 nt, Artificial Sequence
  Synthetic
gucaacgccauguuucaca

SEQ ID NO: 10230 - RNA, 21 nt, Artificial Sequence
  Synthetic
cggucaacgccauguuucaca

SEQ ID NO: 10231 - RNA, 22 nt, Artificial Sequence
  Synthetic
acggucaacgccauguuucaca

SEQ ID NO: 10232 - RNA, 23 nt, Artificial Sequence
  Synthetic
cacggucaacgccauguuucaca

SEQ ID NO: 10233 - RNA, 24 nt, Artificial Sequence
  Synthetic
acacggucaacgccauguuucaca

SEQ ID NO: 10234 - RNA, 18 nt, Artificial Sequence
  Synthetic
uccugaaaguggaggaca

SEQ ID NO: 10235 - RNA, 19 nt, Artificial Sequence
  Synthetic
uuccugaaaguggaggaca

SEQ ID NO: 10236 - RNA, 21 nt, Artificial Sequence
  Synthetic
ccuuccugaaaguggaggaca

SEQ ID NO: 10237 - RNA, 22 nt, Artificial Sequence
  Synthetic
uccuuccugaaaguggaggaca

SEQ ID NO: 10238 - RNA, 23 nt, Artificial Sequence
  Synthetic
guccuuccugaaaguggaggaca

SEQ ID NO: 10239 - RNA, 24 nt, Artificial Sequence
  Synthetic
aguccuuccugaaaguggaggaca

SEQ ID NO: 10240 - RNA, 18 nt, Artificial Sequence
  Synthetic
gcguuuacgcgggggaca

SEQ ID NO: 10241 - RNA, 19 nt, Artificial Sequence
  Synthetic
ggcguuuacgcgggggaca

SEQ ID NO: 10242 - RNA, 21 nt, Artificial Sequence
  Synthetic
ggggcguuuacgcgggggaca

SEQ ID NO: 10243 - RNA, 22 nt, Artificial Sequence
  Synthetic
gggggcguuuacgcgggggaca

SEQ ID NO: 10244 - RNA, 23 nt, Artificial Sequence
  Synthetic
cgggggcguuuacgcgggggaca

SEQ ID NO: 10245 - RNA, 24 nt, Artificial Sequence
  Synthetic
ccgggggcguuuacgcgggggaca

SEQ ID NO: 10246 - RNA, 18 nt, Artificial Sequence
  Synthetic
uccuccgcagugcccgca

SEQ ID NO: 10247 - RNA, 19 nt, Artificial Sequence
  Synthetic
cuccuccgcagugcccgca

SEQ ID NO: 10248 - RNA, 21 nt, Artificial Sequence
  Synthetic
cccuccuccgcagugcccgca

SEQ ID NO: 10249 - RNA, 22 nt, Artificial Sequence
  Synthetic
gcccuccuccgcagugcccgca

SEQ ID NO: 10250 - RNA, 23 nt, Artificial Sequence
  Synthetic
cgcccuccuccgcagugcccgca

SEQ ID NO: 10251 - RNA, 24 nt, Artificial Sequence
  Synthetic
ccgcccuccuccgcagugcccgca

SEQ ID NO: 10252 - RNA, 18 nt, Artificial Sequence
  Synthetic
cgcggaugaccggccgca

SEQ ID NO: 10253 - RNA, 19 nt, Artificial Sequence
  Synthetic
ccgcggaugaccggccgca

SEQ ID NO: 10254 - RNA, 21 nt, Artificial Sequence
  Synthetic
cgccgcggaugaccggccgca

SEQ ID NO: 10255 - RNA, 22 nt, Artificial Sequence
  Synthetic
acgccgcggaugaccggccgca

SEQ ID NO: 10256 - RNA, 23 nt, Artificial Sequence
  Synthetic
gacgccgcggaugaccggccgca

SEQ ID NO: 10257 - RNA, 24 nt, Artificial Sequence
  Synthetic
ggacgccgcggaugaccggccgca

SEQ ID NO: 10258 - RNA, 18 nt, Artificial Sequence
  Synthetic
aggccgccauacacggca

SEQ ID NO: 10259 - RNA, 19 nt, Artificial Sequence
  Synthetic
caggccgccauacacggca

SEQ ID NO: 10260 - RNA, 21 nt, Artificial Sequence
  Synthetic
ugcaggccgccauacacggca

SEQ ID NO: 10261 - RNA, 22 nt, Artificial Sequence
  Synthetic
cugcaggccgccauacacggca

SEQ ID NO: 10262 - RNA, 23 nt, Artificial Sequence
  Synthetic
gcugcaggccgccauacacggca

SEQ ID NO: 10263 - RNA, 24 nt, Artificial Sequence
  Synthetic
ugcugcaggccgccauacacggca

SEQ ID NO: 10264 - RNA, 18 nt, Artificial Sequence
  Synthetic
acggggccuaccaccuca

SEQ ID NO: 10265 - RNA, 19 nt, Artificial Sequence
  Synthetic
aacggggccuaccaccuca

SEQ ID NO: 10266 - RNA, 21 nt, Artificial Sequence
  Synthetic
auaacggggccuaccaccuca

SEQ ID NO: 10267 - RNA, 22 nt, Artificial Sequence
  Synthetic
uauaacggggccuaccaccuca

SEQ ID NO: 10268 - RNA, 23 nt, Artificial Sequence
  Synthetic
cuauaacggggccuaccaccuca

SEQ ID NO: 10269 - RNA, 24 nt, Artificial Sequence
  Synthetic
ucuauaacggggccuaccaccuca

SEQ ID NO: 10270 - RNA, 18 nt, Artificial Sequence
  Synthetic
augacgcauccccgcuca

SEQ ID NO: 10271 - RNA, 19 nt, Artificial Sequence
  Synthetic
uaugacgcauccccgcuca

SEQ ID NO: 10272 - RNA, 21 nt, Artificial Sequence
  Synthetic
ucuaugacgcauccccgcuca

SEQ ID NO: 10273 - RNA, 22 nt, Artificial Sequence
  Synthetic
gucuaugacgcauccccgcuca

SEQ ID NO: 10274 - RNA, 23 nt, Artificial Sequence
  Synthetic
cgucuaugacgcauccccgcuca

SEQ ID NO: 10275 - RNA, 24 nt, Artificial Sequence
  Synthetic
ucgucuaugacgcauccccgcuca

SEQ ID NO: 10276 - RNA, 18 nt, Artificial Sequence
  Synthetic
gccuguucaauccgguca

SEQ ID NO: 10277 - RNA, 19 nt, Artificial Sequence
  Synthetic
ggccuguucaauccgguca

SEQ ID NO: 10278 - RNA, 21 nt, Artificial Sequence
  Synthetic
ugggccuguucaauccgguca

SEQ ID NO: 10279 - RNA, 22 nt, Artificial Sequence
  Synthetic
cugggccuguucaauccgguca

SEQ ID NO: 10280 - RNA, 23 nt, Artificial Sequence
  Synthetic
ccugggccuguucaauccgguca

SEQ ID NO: 10281 - RNA, 24 nt, Artificial Sequence
  Synthetic
cccugggccuguucaauccgguca

SEQ ID NO: 10282 - RNA, 18 nt, Artificial Sequence
  Synthetic
ggguucaccgucguccga

SEQ ID NO: 10283 - RNA, 19 nt, Artificial Sequence
  Synthetic
uggguucaccgucguccga

SEQ ID NO: 10284 - RNA, 21 nt, Artificial Sequence
  Synthetic
uuuggguucaccgucguccga

SEQ ID NO: 10285 - RNA, 22 nt, Artificial Sequence
  Synthetic
guuuggguucaccgucguccga

SEQ ID NO: 10286 - RNA, 23 nt, Artificial Sequence
  Synthetic
gguuuggguucaccgucguccga

SEQ ID NO: 10287 - RNA, 24 nt, Artificial Sequence
  Synthetic
ggguuuggguucaccgucguccga

SEQ ID NO: 10288 - RNA, 18 nt, Artificial Sequence
  Synthetic
ugucucuggaacacgcga

SEQ ID NO: 10289 - RNA, 19 nt, Artificial Sequence
  Synthetic
cugucucuggaacacgcga

SEQ ID NO: 10290 - RNA, 21 nt, Artificial Sequence
  Synthetic
gccugucucuggaacacgcga

SEQ ID NO: 10291 - RNA, 22 nt, Artificial Sequence
  Synthetic
cgccugucucuggaacacgcga

SEQ ID NO: 10292 - RNA, 23 nt, Artificial Sequence
  Synthetic
gcgccugucucuggaacacgcga

SEQ ID NO: 10293 - RNA, 24 nt, Artificial Sequence
  Synthetic
ugcgccugucucuggaacacgcga

SEQ ID NO: 10294 - RNA, 18 nt, Artificial Sequence
  Synthetic
caacaugcgcauauucga

SEQ ID NO: 10295 - RNA, 19 nt, Artificial Sequence
  Synthetic
ccaacaugcgcauauucga

SEQ ID NO: 10296 - RNA, 21 nt, Artificial Sequence
  Synthetic
caccaacaugcgcauauucga

SEQ ID NO: 10297 - RNA, 22 nt, Artificial Sequence
  Synthetic
ccaccaacaugcgcauauucga

SEQ ID NO: 10298 - RNA, 23 nt, Artificial Sequence
  Synthetic
accaccaacaugcgcauauucga

SEQ ID NO: 10299 - RNA, 24 nt, Artificial Sequence
  Synthetic
caccaccaacaugcgcauauucga

SEQ ID NO: 10300 - RNA, 18 nt, Artificial Sequence
  Synthetic
uuacgcgggggacaagga

SEQ ID NO: 10301 - RNA, 19 nt, Artificial Sequence
  Synthetic
uuuacgcgggggacaagga

SEQ ID NO: 10302 - RNA, 21 nt, Artificial Sequence
  Synthetic
cguuuacgcgggggacaagga

SEQ ID NO: 10303 - RNA, 22 nt, Artificial Sequence
  Synthetic
gcguuuacgcgggggacaagga

SEQ ID NO: 10304 - RNA, 23 nt, Artificial Sequence
  Synthetic
ggcguuuacgcgggggacaagga

SEQ ID NO: 10305 - RNA, 24 nt, Artificial Sequence
  Synthetic
gggcguuuacgcgggggacaagga

SEQ ID NO: 10306 - RNA, 18 nt, Artificial Sequence
  Synthetic
gccgcaccggggggcgga

SEQ ID NO: 10307 - RNA, 19 nt, Artificial Sequence
  Synthetic
ggccgcaccggggggcgga

SEQ ID NO: 10308 - RNA, 21 nt, Artificial Sequence
  Synthetic
ccggccgcaccggggggcgga

SEQ ID NO: 10309 - RNA, 22 nt, Artificial Sequence
  Synthetic
accggccgcaccggggggcgga

SEQ ID NO: 10310 - RNA, 23 nt, Artificial Sequence
  Synthetic
gaccggccgcaccggggggcgga

SEQ ID NO: 10311 - RNA, 24 nt, Artificial Sequence
  Synthetic
ugaccggccgcaccggggggcgga

SEQ ID NO: 10312 - RNA, 18 nt, Artificial Sequence
  Synthetic
acggcgagaugguccuga

SEQ ID NO: 10313 - RNA, 19 nt, Artificial Sequence
  Synthetic
uacggcgagaugguccuga

SEQ ID NO: 10314 - RNA, 21 nt, Artificial Sequence
  Synthetic
cguacggcgagaugguccuga

SEQ ID NO: 10315 - RNA, 22 nt, Artificial Sequence
  Synthetic
acguacggcgagaugguccuga

SEQ ID NO: 10316 - RNA, 23 nt, Artificial Sequence
  Synthetic
gacguacggcgagaugguccuga

SEQ ID NO: 10317 - RNA, 24 nt, Artificial Sequence
  Synthetic
ugacguacggcgagaugguccuga

SEQ ID NO: 10318 - RNA, 18 nt, Artificial Sequence
  Synthetic
gacaggaccgcuuuguga

SEQ ID NO: 10319 - RNA, 19 nt, Artificial Sequence
  Synthetic
cgacaggaccgcuuuguga

SEQ ID NO: 10320 - RNA, 21 nt, Artificial Sequence
  Synthetic
uccgacaggaccgcuuuguga

SEQ ID NO: 10321 - RNA, 22 nt, Artificial Sequence
  Synthetic
guccgacaggaccgcuuuguga

SEQ ID NO: 10322 - RNA, 23 nt, Artificial Sequence
  Synthetic
cguccgacaggaccgcuuuguga

SEQ ID NO: 10323 - RNA, 24 nt, Artificial Sequence
  Synthetic
ucguccgacaggaccgcuuuguga

SEQ ID NO: 10324 - RNA, 18 nt, Artificial Sequence
  Synthetic
acggggaccugcucuaua

SEQ ID NO: 10325 - RNA, 19 nt, Artificial Sequence
  Synthetic
uacggggaccugcucuaua

SEQ ID NO: 10326 - RNA, 21 nt, Artificial Sequence
  Synthetic
cguacggggaccugcucuaua

SEQ ID NO: 10327 - RNA, 22 nt, Artificial Sequence
  Synthetic
ucguacggggaccugcucuaua

SEQ ID NO: 10328 - RNA, 23 nt, Artificial Sequence
  Synthetic
uucguacggggaccugcucuaua

SEQ ID NO: 10329 - RNA, 24 nt, Artificial Sequence
  Synthetic
uuucguacggggaccugcucuaua

SEQ ID NO: 10330 - RNA, 18 nt, Artificial Sequence
  Synthetic
ccagugcaucaccagcua

SEQ ID NO: 10331 - RNA, 19 nt, Artificial Sequence
  Synthetic
uccagugcaucaccagcua

SEQ ID NO: 10332 - RNA, 21 nt, Artificial Sequence
  Synthetic
gguccagugcaucaccagcua

SEQ ID NO: 10333 - RNA, 22 nt, Artificial Sequence
  Synthetic
ugguccagugcaucaccagcua

SEQ ID NO: 10334 - RNA, 23 nt, Artificial Sequence
  Synthetic
gugguccagugcaucaccagcua

SEQ ID NO: 10335 - RNA, 24 nt, Artificial Sequence
  Synthetic
cgugguccagugcaucaccagcua

SEQ ID NO: 10336 - RNA, 18 nt, Artificial Sequence
  Synthetic
cgaagccgccaauccgua

SEQ ID NO: 10337 - RNA, 19 nt, Artificial Sequence
  Synthetic
ucgaagccgccaauccgua

SEQ ID NO: 10338 - RNA, 21 nt, Artificial Sequence
  Synthetic
cgucgaagccgccaauccgua

SEQ ID NO: 10339 - RNA, 22 nt, Artificial Sequence
  Synthetic
ccgucgaagccgccaauccgua

SEQ ID NO: 10340 - RNA, 23 nt, Artificial Sequence
  Synthetic
cccgucgaagccgccaauccgua

SEQ ID NO: 10341 - RNA, 24 nt, Artificial Sequence
  Synthetic
ccccgucgaagccgccaauccgua

SEQ ID NO: 10342 - RNA, 18 nt, Artificial Sequence
  Synthetic
gucgcagcgauuuucgua

SEQ ID NO: 10343 - RNA, 19 nt, Artificial Sequence
  Synthetic
cgucgcagcgauuuucgua

SEQ ID NO: 10344 - RNA, 21 nt, Artificial Sequence
  Synthetic
ggcgucgcagcgauuuucgua

SEQ ID NO: 10345 - RNA, 22 nt, Artificial Sequence
  Synthetic
gggcgucgcagcgauuuucgua

SEQ ID NO: 10346 - RNA, 23 nt, Artificial Sequence
  Synthetic
ugggcgucgcagcgauuuucgua

SEQ ID NO: 10347 - RNA, 24 nt, Artificial Sequence
  Synthetic
gugggcgucgcagcgauuuucgua

SEQ ID NO: 10348 - RNA, 18 nt, Artificial Sequence
  Synthetic
cacaacgggcgcguggua

SEQ ID NO: 10349 - RNA, 19 nt, Artificial Sequence
  Synthetic
ucacaacgggcgcguggua

SEQ ID NO: 10350 - RNA, 21 nt, Artificial Sequence
  Synthetic
uuucacaacgggcgcguggua

SEQ ID NO: 10351 - RNA, 22 nt, Artificial Sequence
  Synthetic
guuucacaacgggcgcguggua

SEQ ID NO: 10352 - RNA, 23 nt, Artificial Sequence
  Synthetic
uguuucacaacgggcgcguggua

SEQ ID NO: 10353 - RNA, 24 nt, Artificial Sequence
  Synthetic
auguuucacaacgggcgcguggua

SEQ ID NO: 10354 - RNA, 18 nt, Artificial Sequence
  Synthetic
ggagugcauggccgugua

SEQ ID NO: 10355 - RNA, 19 nt, Artificial Sequence
  Synthetic
aggagugcauggccgugua

SEQ ID NO: 10356 - RNA, 21 nt, Artificial Sequence
  Synthetic
cgaggagugcauggccgugua

SEQ ID NO: 10357 - RNA, 22 nt, Artificial Sequence
  Synthetic
ccgaggagugcauggccgugua

SEQ ID NO: 10358 - RNA, 23 nt, Artificial Sequence
  Synthetic
cccgaggagugcauggccgugua

SEQ ID NO: 10359 - RNA, 24 nt, Artificial Sequence
  Synthetic
ucccgaggagugcauggccgugua

SEQ ID NO: 10360 - RNA, 18 nt, Artificial Sequence
  Synthetic
cuccgcagugcccgcaac

SEQ ID NO: 10361 - RNA, 19 nt, Artificial Sequence
  Synthetic
ccuccgcagugcccgcaac

SEQ ID NO: 10362 - RNA, 21 nt, Artificial Sequence
  Synthetic
cuccuccgcagugcccgcaac

SEQ ID NO: 10363 - RNA, 22 nt, Artificial Sequence
  Synthetic
ccuccuccgcagugcccgcaac

SEQ ID NO: 10364 - RNA, 23 nt, Artificial Sequence
  Synthetic
cccuccuccgcagugcccgcaac

SEQ ID NO: 10365 - RNA, 24 nt, Artificial Sequence
  Synthetic
gcccuccuccgcagugcccgcaac

SEQ ID NO: 10366 - RNA, 18 nt, Artificial Sequence
  Synthetic
acccagccgcgcgcgaac

SEQ ID NO: 10367 - RNA, 19 nt, Artificial Sequence
  Synthetic
cacccagccgcgcgcgaac

SEQ ID NO: 10368 - RNA, 21 nt, Artificial Sequence
  Synthetic
cucacccagccgcgcgcgaac

SEQ ID NO: 10369 - RNA, 22 nt, Artificial Sequence
  Synthetic
gcucacccagccgcgcgcgaac

SEQ ID NO: 10370 - RNA, 23 nt, Artificial Sequence
  Synthetic
cgcucacccagccgcgcgcgaac

SEQ ID NO: 10371 - RNA, 24 nt, Artificial Sequence
  Synthetic
acgcucacccagccgcgcgcgaac

SEQ ID NO: 10372 - RNA, 18 nt, Artificial Sequence
  Synthetic
gcggaugaccggccgcac

SEQ ID NO: 10373 - RNA, 19 nt, Artificial Sequence
  Synthetic
cgcggaugaccggccgcac

SEQ ID NO: 10374 - RNA, 21 nt, Artificial Sequence
  Synthetic
gccgcggaugaccggccgcac

SEQ ID NO: 10375 - RNA, 22 nt, Artificial Sequence
  Synthetic
cgccgcggaugaccggccgcac

SEQ ID NO: 10376 - RNA, 23 nt, Artificial Sequence
  Synthetic
acgccgcggaugaccggccgcac

SEQ ID NO: 10377 - RNA, 24 nt, Artificial Sequence
  Synthetic
gacgccgcggaugaccggccgcac

SEQ ID NO: 10378 - RNA, 18 nt, Artificial Sequence
  Synthetic
gugcgaagucuggacgac

SEQ ID NO: 10379 - RNA, 19 nt, Artificial Sequence
  Synthetic
cgugcgaagucuggacgac

SEQ ID NO: 10380 - RNA, 21 nt, Artificial Sequence
  Synthetic
gccgugcgaagucuggacgac

SEQ ID NO: 10381 - RNA, 22 nt, Artificial Sequence
  Synthetic
ggccgugcgaagucuggacgac

SEQ ID NO: 10382 - RNA, 23 nt, Artificial Sequence
  Synthetic
aggccgugcgaagucuggacgac

SEQ ID NO: 10383 - RNA, 24 nt, Artificial Sequence
  Synthetic
aaggccgugcgaagucuggacgac

SEQ ID NO: 10384 - RNA, 18 nt, Artificial Sequence
  Synthetic
cgcaaccccgucaccgac

SEQ ID NO: 10385 - RNA, 19 nt, Artificial Sequence
  Synthetic
ccgcaaccccgucaccgac

SEQ ID NO: 10386 - RNA, 21 nt, Artificial Sequence
  Synthetic
guccgcaaccccgucaccgac

SEQ ID NO: 10387 - RNA, 22 nt, Artificial Sequence
  Synthetic
cguccgcaaccccgucaccgac

SEQ ID NO: 10388 - RNA, 23 nt, Artificial Sequence
  Synthetic
ccguccgcaaccccgucaccgac

SEQ ID NO: 10389 - RNA, 24 nt, Artificial Sequence
  Synthetic
accguccgcaaccccgucaccgac

SEQ ID NO: 10390 - RNA, 18 nt, Artificial Sequence
  Synthetic
ugcucggcggcgcccgac

SEQ ID NO: 10391 - RNA, 19 nt, Artificial Sequence
  Synthetic
cugcucggcggcgcccgac

SEQ ID NO: 10392 - RNA, 21 nt, Artificial Sequence
  Synthetic
cucugcucggcggcgcccgac

SEQ ID NO: 10393 - RNA, 22 nt, Artificial Sequence
  Synthetic
gcucugcucggcggcgcccgac

SEQ ID NO: 10394 - RNA, 23 nt, Artificial Sequence
  Synthetic
ugcucugcucggcggcgcccgac

SEQ ID NO: 10395 - RNA, 24 nt, Artificial Sequence
  Synthetic
cugcucugcucggcggcgcccgac

SEQ ID NO: 10396 - RNA, 18 nt, Artificial Sequence
  Synthetic
uuuguggggguggccgac

SEQ ID NO: 10397 - RNA, 19 nt, Artificial Sequence
  Synthetic
cuuuguggggguggccgac

SEQ ID NO: 10398 - RNA, 21 nt, Artificial Sequence
  Synthetic
uucuuuguggggguggccgac

SEQ ID NO: 10399 - RNA, 22 nt, Artificial Sequence
  Synthetic
cuucuuuguggggguggccgac

SEQ ID NO: 10400 - RNA, 23 nt, Artificial Sequence
  Synthetic
acuucuuuguggggguggccgac

SEQ ID NO: 10401 - RNA, 24 nt, Artificial Sequence
  Synthetic
gacuucuuuguggggguggccgac

SEQ ID NO: 10402 - RNA, 18 nt, Artificial Sequence
  Synthetic
caggaggagcagcucgac

SEQ ID NO: 10403 - RNA, 19 nt, Artificial Sequence
  Synthetic
gcaggaggagcagcucgac

SEQ ID NO: 10404 - RNA, 21 nt, Artificial Sequence
  Synthetic
augcaggaggagcagcucgac

SEQ ID NO: 10405 - RNA, 22 nt, Artificial Sequence
  Synthetic
gaugcaggaggagcagcucgac

SEQ ID NO: 10406 - RNA, 23 nt, Artificial Sequence
  Synthetic
agaugcaggaggagcagcucgac

SEQ ID NO: 10407 - RNA, 24 nt, Artificial Sequence
  Synthetic
gagaugcaggaggagcagcucgac

SEQ ID NO: 10408 - RNA, 18 nt, Artificial Sequence
  Synthetic
ggcguuuacgcgggggac

SEQ ID NO: 10409 - RNA, 19 nt, Artificial Sequence
  Synthetic
gggcguuuacgcgggggac

SEQ ID NO: 10410 - RNA, 21 nt, Artificial Sequence
  Synthetic
gggggcguuuacgcgggggac

SEQ ID NO: 10411 - RNA, 22 nt, Artificial Sequence
  Synthetic
cgggggcguuuacgcgggggac

SEQ ID NO: 10412 - RNA, 23 nt, Artificial Sequence
  Synthetic
ccgggggcguuuacgcgggggac

SEQ ID NO: 10413 - RNA, 24 nt, Artificial Sequence
  Synthetic
gccgggggcguuuacgcgggggac

SEQ ID NO: 10414 - RNA, 18 nt, Artificial Sequence
  Synthetic
ccgcgcgcgaacguggac

SEQ ID NO: 10415 - RNA, 19 nt, Artificial Sequence
  Synthetic
gccgcgcgcgaacguggac

SEQ ID NO: 10416 - RNA, 21 nt, Artificial Sequence
  Synthetic
cagccgcgcgcgaacguggac

SEQ ID NO: 10417 - RNA, 22 nt, Artificial Sequence
  Synthetic
ccagccgcgcgcgaacguggac

SEQ ID NO: 10418 - RNA, 23 nt, Artificial Sequence
  Synthetic
cccagccgcgcgcgaacguggac

SEQ ID NO: 10419 - RNA, 24 nt, Artificial Sequence
  Synthetic
acccagccgcgcgcgaacguggac

SEQ ID NO: 10420 - RNA, 18 nt, Artificial Sequence
  Synthetic
uugccgaugcaacgauac

SEQ ID NO: 10421 - RNA, 19 nt, Artificial Sequence
  Synthetic
guugccgaugcaacgauac

SEQ ID NO: 10422 - RNA, 21 nt, Artificial Sequence
  Synthetic
uuguugccgaugcaacgauac

SEQ ID NO: 10423 - RNA, 22 nt, Artificial Sequence
  Synthetic
guuguugccgaugcaacgauac

SEQ ID NO: 10424 - RNA, 23 nt, Artificial Sequence
  Synthetic
uguuguugccgaugcaacgauac

SEQ ID NO: 10425 - RNA, 24 nt, Artificial Sequence
  Synthetic
uuguuguugccgaugcaacgauac

SEQ ID NO: 10426 - RNA, 18 nt, Artificial Sequence
  Synthetic
cagugcaucaccagcuac

SEQ ID NO: 10427 - RNA, 19 nt, Artificial Sequence
  Synthetic
ccagugcaucaccagcuac

SEQ ID NO: 10428 - RNA, 21 nt, Artificial Sequence
  Synthetic
guccagugcaucaccagcuac

SEQ ID NO: 10429 - RNA, 22 nt, Artificial Sequence
  Synthetic
gguccagugcaucaccagcuac

SEQ ID NO: 10430 - RNA, 23 nt, Artificial Sequence
  Synthetic
ugguccagugcaucaccagcuac

SEQ ID NO: 10431 - RNA, 24 nt, Artificial Sequence
  Synthetic
gugguccagugcaucaccagcuac

SEQ ID NO: 10432 - RNA, 18 nt, Artificial Sequence
  Synthetic
ucgcagcgauuuucguac

SEQ ID NO: 10433 - RNA, 19 nt, Artificial Sequence
  Synthetic
gucgcagcgauuuucguac

SEQ ID NO: 10434 - RNA, 21 nt, Artificial Sequence
  Synthetic
gcgucgcagcgauuuucguac

SEQ ID NO: 10435 - RNA, 22 nt, Artificial Sequence
  Synthetic
ggcgucgcagcgauuuucguac

SEQ ID NO: 10436 - RNA, 23 nt, Artificial Sequence
  Synthetic
gggcgucgcagcgauuuucguac

SEQ ID NO: 10437 - RNA, 24 nt, Artificial Sequence
  Synthetic
ugggcgucgcagcgauuuucguac

SEQ ID NO: 10438 - RNA, 18 nt, Artificial Sequence
  Synthetic
gagugcauggccguguac

SEQ ID NO: 10439 - RNA, 19 nt, Artificial Sequence
  Synthetic
ggagugcauggccguguac

SEQ ID NO: 10440 - RNA, 21 nt, Artificial Sequence
  Synthetic
gaggagugcauggccguguac

SEQ ID NO: 10441 - RNA, 22 nt, Artificial Sequence
  Synthetic
cgaggagugcauggccguguac

SEQ ID NO: 10442 - RNA, 23 nt, Artificial Sequence
  Synthetic
ccgaggagugcauggccguguac

SEQ ID NO: 10443 - RNA, 24 nt, Artificial Sequence
  Synthetic
cccgaggagugcauggccguguac

SEQ ID NO: 10444 - RNA, 18 nt, Artificial Sequence
  Synthetic
gccgccgggggcguuuac

SEQ ID NO: 10445 - RNA, 19 nt, Artificial Sequence
  Synthetic
cgccgccgggggcguuuac

SEQ ID NO: 10446 - RNA, 21 nt, Artificial Sequence
  Synthetic
cgcgccgccgggggcguuuac

SEQ ID NO: 10447 - RNA, 22 nt, Artificial Sequence
  Synthetic
acgcgccgccgggggcguuuac

SEQ ID NO: 10448 - RNA, 23 nt, Artificial Sequence
  Synthetic
gacgcgccgccgggggcguuuac

SEQ ID NO: 10449 - RNA, 24 nt, Artificial Sequence
  Synthetic
ggacgcgccgccgggggcguuuac

SEQ ID NO: 10450 - RNA, 18 nt, Artificial Sequence
  Synthetic
cuuccccaaaacuuuuac

SEQ ID NO: 10451 - RNA, 19 nt, Artificial Sequence
  Synthetic
ccuuccccaaaacuuuuac

SEQ ID NO: 10452 - RNA, 21 nt, Artificial Sequence
  Synthetic
aaccuuccccaaaacuuuuac

SEQ ID NO: 10453 - RNA, 22 nt, Artificial Sequence
  Synthetic
caaccuuccccaaaacuuuuac

SEQ ID NO: 10454 - RNA, 23 nt, Artificial Sequence
  Synthetic
gcaaccuuccccaaaacuuuuac

SEQ ID NO: 10455 - RNA, 24 nt, Artificial Sequence
  Synthetic
ggcaaccuuccccaaaacuuuuac

SEQ ID NO: 10456 - RNA, 18 nt, Artificial Sequence
  Synthetic
cggaugaccggccgcacc

SEQ ID NO: 10457 - RNA, 19 nt, Artificial Sequence
  Synthetic
gcggaugaccggccgcacc

SEQ ID NO: 10458 - RNA, 21 nt, Artificial Sequence
  Synthetic
ccgcggaugaccggccgcacc

SEQ ID NO: 10459 - RNA, 22 nt, Artificial Sequence
  Synthetic
gccgcggaugaccggccgcacc

SEQ ID NO: 10460 - RNA, 23 nt, Artificial Sequence
  Synthetic
cgccgcggaugaccggccgcacc

SEQ ID NO: 10461 - RNA, 24 nt, Artificial Sequence
  Synthetic
acgccgcggaugaccggccgcacc

SEQ ID NO: 10462 - RNA, 18 nt, Artificial Sequence
  Synthetic
cggggccgcugcugcacc

SEQ ID NO: 10463 - RNA, 19 nt, Artificial Sequence
  Synthetic
gcggggccgcugcugcacc

SEQ ID NO: 10464 - RNA, 21 nt, Artificial Sequence
  Synthetic
ucgcggggccgcugcugcacc

SEQ ID NO: 10465 - RNA, 22 nt, Artificial Sequence
  Synthetic
cucgcggggccgcugcugcacc

SEQ ID NO: 10466 - RNA, 23 nt, Artificial Sequence
  Synthetic
ucucgcggggccgcugcugcacc

SEQ ID NO: 10467 - RNA, 24 nt, Artificial Sequence
  Synthetic
uucucgcggggccgcugcugcacc

SEQ ID NO: 10468 - RNA, 18 nt, Artificial Sequence
  Synthetic
gcauguaacguggcgacc

SEQ ID NO: 10469 - RNA, 19 nt, Artificial Sequence
  Synthetic
ggcauguaacguggcgacc

SEQ ID NO: 10470 - RNA, 21 nt, Artificial Sequence
  Synthetic
gcggcauguaacguggcgacc

SEQ ID NO: 10471 - RNA, 22 nt, Artificial Sequence
  Synthetic
ggcggcauguaacguggcgacc

SEQ ID NO: 10472 - RNA, 23 nt, Artificial Sequence
  Synthetic
cggcggcauguaacguggcgacc

SEQ ID NO: 10473 - RNA, 24 nt, Artificial Sequence
  Synthetic
gcggcggcauguaacguggcgacc

SEQ ID NO: 10474 - RNA, 18 nt, Artificial Sequence
  Synthetic
gcggaaggccagaugacc

SEQ ID NO: 10475 - RNA, 19 nt, Artificial Sequence
  Synthetic
cgcggaaggccagaugacc

SEQ ID NO: 10476 - RNA, 21 nt, Artificial Sequence
  Synthetic
gucgcggaaggccagaugacc

SEQ ID NO: 10477 - RNA, 22 nt, Artificial Sequence
  Synthetic
ggucgcggaaggccagaugacc

SEQ ID NO: 10478 - RNA, 23 nt, Artificial Sequence
  Synthetic
gggucgcggaaggccagaugacc

SEQ ID NO: 10479 - RNA, 24 nt, Artificial Sequence
  Synthetic
ugggucgcggaaggccagaugacc

SEQ ID NO: 10480 - RNA, 18 nt, Artificial Sequence
  Synthetic
cguacgucgugaccuacc

SEQ ID NO: 10481 - RNA, 19 nt, Artificial Sequence
  Synthetic
ucguacgucgugaccuacc

SEQ ID NO: 10482 - RNA, 21 nt, Artificial Sequence
  Synthetic
ucucguacgucgugaccuacc

SEQ ID NO: 10483 - RNA, 22 nt, Artificial Sequence
  Synthetic
gucucguacgucgugaccuacc

SEQ ID NO: 10484 - RNA, 23 nt, Artificial Sequence
  Synthetic
ggucucguacgucgugaccuacc

SEQ ID NO: 10485 - RNA, 24 nt, Artificial Sequence
  Synthetic
uggucucguacgucgugaccuacc

SEQ ID NO: 10486 - RNA, 18 nt, Artificial Sequence
  Synthetic
cgcggccacggccaaccc

SEQ ID NO: 10487 - RNA, 19 nt, Artificial Sequence
  Synthetic
ucgcggccacggccaaccc

SEQ ID NO: 10488 - RNA, 21 nt, Artificial Sequence
  Synthetic
cuucgcggccacggccaaccc

SEQ ID NO: 10489 - RNA, 22 nt, Artificial Sequence
  Synthetic
ccuucgcggccacggccaaccc

SEQ ID NO: 10490 - RNA, 23 nt, Artificial Sequence
  Synthetic
gccuucgcggccacggccaaccc

SEQ ID NO: 10491 - RNA, 24 nt, Artificial Sequence
  Synthetic
ggccuucgcggccacggccaaccc

SEQ ID NO: 10492 - RNA, 18 nt, Artificial Sequence
  Synthetic
ccgccggcccugcaaccc

SEQ ID NO: 10493 - RNA, 19 nt, Artificial Sequence
  Synthetic
uccgccggcccugcaaccc

SEQ ID NO: 10494 - RNA, 21 nt, Artificial Sequence
  Synthetic
cuuccgccggcccugcaaccc

SEQ ID NO: 10495 - RNA, 22 nt, Artificial Sequence
  Synthetic
acuuccgccggcccugcaaccc

SEQ ID NO: 10496 - RNA, 23 nt, Artificial Sequence
  Synthetic
uacuuccgccggcccugcaaccc

SEQ ID NO: 10497 - RNA, 24 nt, Artificial Sequence
  Synthetic
cuacuuccgccggcccugcaaccc

SEQ ID NO: 10498 - RNA, 18 nt, Artificial Sequence
  Synthetic
cggaaggccagaugaccc

SEQ ID NO: 10499 - RNA, 19 nt, Artificial Sequence
  Synthetic
gcggaaggccagaugaccc

SEQ ID NO: 10500 - RNA, 21 nt, Artificial Sequence
  Synthetic
ucgcggaaggccagaugaccc

SEQ ID NO: 10501 - RNA, 22 nt, Artificial Sequence
  Synthetic
gucgcggaaggccagaugaccc

SEQ ID NO: 10502 - RNA, 23 nt, Artificial Sequence
  Synthetic
ggucgcggaaggccagaugaccc

SEQ ID NO: 10503 - RNA, 24 nt, Artificial Sequence
  Synthetic
gggucgcggaaggccagaugaccc

SEQ ID NO: 10504 - RNA, 18 nt, Artificial Sequence
  Synthetic
cgccggcccugcaacccc

SEQ ID NO: 10505 - RNA, 19 nt, Artificial Sequence
  Synthetic
ccgccggcccugcaacccc

SEQ ID NO: 10506 - RNA, 21 nt, Artificial Sequence
  Synthetic
uuccgccggcccugcaacccc

SEQ ID NO: 10507 - RNA, 22 nt, Artificial Sequence
  Synthetic
cuuccgccggcccugcaacccc

SEQ ID NO: 10508 - RNA, 23 nt, Artificial Sequence
  Synthetic
acuuccgccggcccugcaacccc

SEQ ID NO: 10509 - RNA, 24 nt, Artificial Sequence
  Synthetic
uacuuccgccggcccugcaacccc

SEQ ID NO: 10510 - RNA, 18 nt, Artificial Sequence
  Synthetic
gccggcccugcaaccccc

SEQ ID NO: 10511 - RNA, 19 nt, Artificial Sequence
  Synthetic
cgccggcccugcaaccccc

SEQ ID NO: 10512 - RNA, 21 nt, Artificial Sequence
  Synthetic
uccgccggcccugcaaccccc

SEQ ID NO: 10513 - RNA, 22 nt, Artificial Sequence
  Synthetic
uuccgccggcccugcaaccccc

SEQ ID NO: 10514 - RNA, 23 nt, Artificial Sequence
  Synthetic
cuuccgccggcccugcaaccccc

SEQ ID NO: 10515 - RNA, 24 nt, Artificial Sequence
  Synthetic
acuuccgccggcccugcaaccccc

SEQ ID NO: 10516 - RNA, 18 nt, Artificial Sequence
  Synthetic
guacaguuuaagcgcccc

SEQ ID NO: 10517 - RNA, 19 nt, Artificial Sequence
  Synthetic
cguacaguuuaagcgcccc

SEQ ID NO: 10518 - RNA, 21 nt, Artificial Sequence
  Synthetic
gacguacaguuuaagcgcccc

SEQ ID NO: 10519 - RNA, 22 nt, Artificial Sequence
  Synthetic
cgacguacaguuuaagcgcccc

SEQ ID NO: 10520 - RNA, 23 nt, Artificial Sequence
  Synthetic
gcgacguacaguuuaagcgcccc

SEQ ID NO: 10521 - RNA, 24 nt, Artificial Sequence
  Synthetic
agcgacguacaguuuaagcgcccc

SEQ ID NO: 10522 - RNA, 18 nt, Artificial Sequence
  Synthetic
uggucuuucuggaggccc

SEQ ID NO: 10523 - RNA, 19 nt, Artificial Sequence
  Synthetic
cuggucuuucuggaggccc

SEQ ID NO: 10524 - RNA, 21 nt, Artificial Sequence
  Synthetic
agcuggucuuucuggaggccc

SEQ ID NO: 10525 - RNA, 22 nt, Artificial Sequence
  Synthetic
aagcuggucuuucuggaggccc

SEQ ID NO: 10526 - RNA, 23 nt, Artificial Sequence
  Synthetic
gaagcuggucuuucuggaggccc

SEQ ID NO: 10527 - RNA, 24 nt, Artificial Sequence
  Synthetic
agaagcuggucuuucuggaggccc

SEQ ID NO: 10528 - RNA, 18 nt, Artificial Sequence
  Synthetic
cguucccccggccggccc

SEQ ID NO: 10529 - RNA, 19 nt, Artificial Sequence
  Synthetic
acguucccccggccggccc

SEQ ID NO: 10530 - RNA, 21 nt, Artificial Sequence
  Synthetic
ggacguucccccggccggccc

SEQ ID NO: 10531 - RNA, 22 nt, Artificial Sequence
  Synthetic
gggacguucccccggccggccc

SEQ ID NO: 10532 - RNA, 23 nt, Artificial Sequence
  Synthetic
ggggacguucccccggccggccc

SEQ ID NO: 10533 - RNA, 24 nt, Artificial Sequence
  Synthetic
gggggacguucccccggccggccc

SEQ ID NO: 10534 - RNA, 18 nt, Artificial Sequence
  Synthetic
gggggcagcgccuggccc

SEQ ID NO: 10535 - RNA, 19 nt, Artificial Sequence
  Synthetic
ugggggcagcgccuggccc

SEQ ID NO: 10536 - RNA, 21 nt, Artificial Sequence
  Synthetic
ccugggggcagcgccuggccc

SEQ ID NO: 10537 - RNA, 22 nt, Artificial Sequence
  Synthetic
gccugggggcagcgccuggccc

SEQ ID NO: 10538 - RNA, 23 nt, Artificial Sequence
  Synthetic
cgccugggggcagcgccuggccc

SEQ ID NO: 10539 - RNA, 24 nt, Artificial Sequence
  Synthetic
acgccugggggcagcgccuggccc

SEQ ID NO: 10540 - RNA, 18 nt, Artificial Sequence
  Synthetic
cugacguucguccugccc

SEQ ID NO: 10541 - RNA, 19 nt, Artificial Sequence
  Synthetic
ccugacguucguccugccc

SEQ ID NO: 10542 - RNA, 21 nt, Artificial Sequence
  Synthetic
gaccugacguucguccugccc

SEQ ID NO: 10543 - RNA, 22 nt, Artificial Sequence
  Synthetic
ggaccugacguucguccugccc

SEQ ID NO: 10544 - RNA, 23 nt, Artificial Sequence
  Synthetic
uggaccugacguucguccugccc

SEQ ID NO: 10545 - RNA, 24 nt, Artificial Sequence
  Synthetic
auggaccugacguucguccugccc

SEQ ID NO: 10546 - RNA, 18 nt, Artificial Sequence
  Synthetic
cucgggggagaccuuccc

SEQ ID NO: 10547 - RNA, 19 nt, Artificial Sequence
  Synthetic
ccucgggggagaccuuccc

SEQ ID NO: 10548 - RNA, 21 nt, Artificial Sequence
  Synthetic
uaccucgggggagaccuuccc

SEQ ID NO: 10549 - RNA, 22 nt, Artificial Sequence
  Synthetic
cuaccucgggggagaccuuccc

SEQ ID NO: 10550 - RNA, 23 nt, Artificial Sequence
  Synthetic
ccuaccucgggggagaccuuccc

SEQ ID NO: 10551 - RNA, 24 nt, Artificial Sequence
  Synthetic
accuaccucgggggagaccuuccc

SEQ ID NO: 10552 - RNA, 18 nt, Artificial Sequence
  Synthetic
aacacccaggcccgagcc

SEQ ID NO: 10553 - RNA, 19 nt, Artificial Sequence
  Synthetic
caacacccaggcccgagcc

SEQ ID NO: 10554 - RNA, 21 nt, Artificial Sequence
  Synthetic
cacaacacccaggcccgagcc

SEQ ID NO: 10555 - RNA, 22 nt, Artificial Sequence
  Synthetic
gcacaacacccaggcccgagcc

SEQ ID NO: 10556 - RNA, 23 nt, Artificial Sequence
  Synthetic
ugcacaacacccaggcccgagcc

SEQ ID NO: 10557 - RNA, 24 nt, Artificial Sequence
  Synthetic
cugcacaacacccaggcccgagcc

SEQ ID NO: 10558 - RNA, 18 nt, Artificial Sequence
  Synthetic
cagcuguuuuugaacgcc

SEQ ID NO: 10559 - RNA, 19 nt, Artificial Sequence
  Synthetic
gcagcuguuuuugaacgcc

SEQ ID NO: 10560 - RNA, 21 nt, Artificial Sequence
  Synthetic
cagcagcuguuuuugaacgcc

SEQ ID NO: 10561 - RNA, 22 nt, Artificial Sequence
  Synthetic
gcagcagcuguuuuugaacgcc

SEQ ID NO: 10562 - RNA, 23 nt, Artificial Sequence
  Synthetic
ugcagcagcuguuuuugaacgcc

SEQ ID NO: 10563 - RNA, 24 nt, Artificial Sequence
  Synthetic
augcagcagcuguuuuugaacgcc

SEQ ID NO: 10564 - RNA, 18 nt, Artificial Sequence
  Synthetic
cgguuugccgcgcacgcc

SEQ ID NO: 10565 - RNA, 19 nt, Artificial Sequence
  Synthetic
acgguuugccgcgcacgcc

SEQ ID NO: 10566 - RNA, 21 nt, Artificial Sequence
  Synthetic
gaacgguuugccgcgcacgcc

SEQ ID NO: 10567 - RNA, 22 nt, Artificial Sequence
  Synthetic
ggaacgguuugccgcgcacgcc

SEQ ID NO: 10568 - RNA, 23 nt, Artificial Sequence
  Synthetic
uggaacgguuugccgcgcacgcc

SEQ ID NO: 10569 - RNA, 24 nt, Artificial Sequence
  Synthetic
auggaacgguuugccgcgcacgcc

SEQ ID NO: 10570 - RNA, 18 nt, Artificial Sequence
  Synthetic
gcggcguuccgggacgcc

SEQ ID NO: 10571 - RNA, 19 nt, Artificial Sequence
  Synthetic
ggcggcguuccgggacgcc

SEQ ID NO: 10572 - RNA, 21 nt, Artificial Sequence
  Synthetic
ccggcggcguuccgggacgcc

SEQ ID NO: 10573 - RNA, 22 nt, Artificial Sequence
  Synthetic
uccggcggcguuccgggacgcc

SEQ ID NO: 10574 - RNA, 23 nt, Artificial Sequence
  Synthetic
guccggcggcguuccgggacgcc

SEQ ID NO: 10575 - RNA, 24 nt, Artificial Sequence
  Synthetic
uguccggcggcguuccgggacgcc

SEQ ID NO: 10576 - RNA, 18 nt, Artificial Sequence
  Synthetic
ucguggcgggaaaccgcc

SEQ ID NO: 10577 - RNA, 19 nt, Artificial Sequence
  Synthetic
gucguggcgggaaaccgcc

SEQ ID NO: 10578 - RNA, 21 nt, Artificial Sequence
  Synthetic
cggucguggcgggaaaccgcc

SEQ ID NO: 10579 - RNA, 22 nt, Artificial Sequence
  Synthetic
gcggucguggcgggaaaccgcc

SEQ ID NO: 10580 - RNA, 23 nt, Artificial Sequence
  Synthetic
cgcggucguggcgggaaaccgcc

SEQ ID NO: 10581 - RNA, 24 nt, Artificial Sequence
  Synthetic
acgcggucguggcgggaaaccgcc

SEQ ID NO: 10582 - RNA, 18 nt, Artificial Sequence
  Synthetic
gcaaggcgggccaccgcc

SEQ ID NO: 10583 - RNA, 19 nt, Artificial Sequence
  Synthetic
ggcaaggcgggccaccgcc

SEQ ID NO: 10584 - RNA, 21 nt, Artificial Sequence
  Synthetic
ugggcaaggcgggccaccgcc

SEQ ID NO: 10585 - RNA, 22 nt, Artificial Sequence
  Synthetic
cugggcaaggcgggccaccgcc

SEQ ID NO: 10586 - RNA, 23 nt, Artificial Sequence
  Synthetic
ccugggcaaggcgggccaccgcc

SEQ ID NO: 10587 - RNA, 24 nt, Artificial Sequence
  Synthetic
uccugggcaaggcgggccaccgcc

SEQ ID NO: 10588 - RNA, 18 nt, Artificial Sequence
  Synthetic
ccccggggacgcgccgcc

SEQ ID NO: 10589 - RNA, 19 nt, Artificial Sequence
  Synthetic
cccccggggacgcgccgcc

SEQ ID NO: 10590 - RNA, 21 nt, Artificial Sequence
  Synthetic
aacccccggggacgcgccgcc

SEQ ID NO: 10591 - RNA, 22 nt, Artificial Sequence
  Synthetic
caacccccggggacgcgccgcc

SEQ ID NO: 10592 - RNA, 23 nt, Artificial Sequence
  Synthetic
gcaacccccggggacgcgccgcc

SEQ ID NO: 10593 - RNA, 24 nt, Artificial Sequence
  Synthetic
ugcaacccccggggacgcgccgcc

SEQ ID NO: 10594 - RNA, 18 nt, Artificial Sequence
  Synthetic
uacccccuggugggcgcc

SEQ ID NO: 10595 - RNA, 19 nt, Artificial Sequence
  Synthetic
cuacccccuggugggcgcc

SEQ ID NO: 10596 - RNA, 21 nt, Artificial Sequence
  Synthetic
cccuacccccuggugggcgcc

SEQ ID NO: 10597 - RNA, 22 nt, Artificial Sequence
  Synthetic
ucccuacccccuggugggcgcc

SEQ ID NO: 10598 - RNA, 23 nt, Artificial Sequence
  Synthetic
uucccuacccccuggugggcgcc

SEQ ID NO: 10599 - RNA, 24 nt, Artificial Sequence
  Synthetic
guucccuacccccuggugggcgcc

SEQ ID NO: 10600 - RNA, 18 nt, Artificial Sequence
  Synthetic
cuggucuuucuggaggcc

SEQ ID NO: 10601 - RNA, 19 nt, Artificial Sequence
  Synthetic
gcuggucuuucuggaggcc

SEQ ID NO: 10602 - RNA, 21 nt, Artificial Sequence
  Synthetic
aagcuggucuuucuggaggcc

SEQ ID NO: 10603 - RNA, 22 nt, Artificial Sequence
  Synthetic
gaagcuggucuuucuggaggcc

SEQ ID NO: 10604 - RNA, 23 nt, Artificial Sequence
  Synthetic
agaagcuggucuuucuggaggcc

SEQ ID NO: 10605 - RNA, 24 nt, Artificial Sequence
  Synthetic
gagaagcuggucuuucuggaggcc

SEQ ID NO: 10606 - RNA, 18 nt, Artificial Sequence
  Synthetic
acuuuacccugaccggcc

SEQ ID NO: 10607 - RNA, 19 nt, Artificial Sequence
  Synthetic
gacuuuacccugaccggcc

SEQ ID NO: 10608 - RNA, 21 nt, Artificial Sequence
  Synthetic
augacuuuacccugaccggcc

SEQ ID NO: 10609 - RNA, 22 nt, Artificial Sequence
  Synthetic
gaugacuuuacccugaccggcc

SEQ ID NO: 10610 - RNA, 23 nt, Artificial Sequence
  Synthetic
ugaugacuuuacccugaccggcc

SEQ ID NO: 10611 - RNA, 24 nt, Artificial Sequence
  Synthetic
uugaugacuuuacccugaccggcc

SEQ ID NO: 10612 - RNA, 18 nt, Artificial Sequence
  Synthetic
acguucccccggccggcc

SEQ ID NO: 10613 - RNA, 19 nt, Artificial Sequence
  Synthetic
gacguucccccggccggcc

SEQ ID NO: 10614 - RNA, 21 nt, Artificial Sequence
  Synthetic
gggacguucccccggccggcc

SEQ ID NO: 10615 - RNA, 22 nt, Artificial Sequence
  Synthetic
ggggacguucccccggccggcc

SEQ ID NO: 10616 - RNA, 23 nt, Artificial Sequence
  Synthetic
gggggacguucccccggccggcc

SEQ ID NO: 10617 - RNA, 24 nt, Artificial Sequence
  Synthetic
ggggggacguucccccggccggcc

SEQ ID NO: 10618 - RNA, 18 nt, Artificial Sequence
  Synthetic
guccgcgagagcgcggcc

SEQ ID NO: 10619 - RNA, 19 nt, Artificial Sequence
  Synthetic
cguccgcgagagcgcggcc

SEQ ID NO: 10620 - RNA, 21 nt, Artificial Sequence
  Synthetic
cacguccgcgagagcgcggcc

SEQ ID NO: 10621 - RNA, 22 nt, Artificial Sequence
  Synthetic
gcacguccgcgagagcgcggcc

SEQ ID NO: 10622 - RNA, 23 nt, Artificial Sequence
  Synthetic
agcacguccgcgagagcgcggcc

SEQ ID NO: 10623 - RNA, 24 nt, Artificial Sequence
  Synthetic
cagcacguccgcgagagcgcggcc

SEQ ID NO: 10624 - RNA, 18 nt, Artificial Sequence
  Synthetic
cugaugcggcgcgcggcc

SEQ ID NO: 10625 - RNA, 19 nt, Artificial Sequence
  Synthetic
ccugaugcggcgcgcggcc

SEQ ID NO: 10626 - RNA, 21 nt, Artificial Sequence
  Synthetic
gcccugaugcggcgcgcggcc

SEQ ID NO: 10627 - RNA, 22 nt, Artificial Sequence
  Synthetic
cgcccugaugcggcgcgcggcc

SEQ ID NO: 10628 - RNA, 23 nt, Artificial Sequence
  Synthetic
acgcccugaugcggcgcgcggcc

SEQ ID NO: 10629 - RNA, 24 nt, Artificial Sequence
  Synthetic
gacgcccugaugcggcgcgcggcc

SEQ ID NO: 10630 - RNA, 18 nt, Artificial Sequence
  Synthetic
uccgggacgcccggggcc

SEQ ID NO: 10631 - RNA, 19 nt, Artificial Sequence
  Synthetic
uuccgggacgcccggggcc

SEQ ID NO: 10632 - RNA, 21 nt, Artificial Sequence
  Synthetic
cguuccgggacgcccggggcc

SEQ ID NO: 10633 - RNA, 22 nt, Artificial Sequence
  Synthetic
gcguuccgggacgcccggggcc

SEQ ID NO: 10634 - RNA, 23 nt, Artificial Sequence
  Synthetic
ggcguuccgggacgcccggggcc

SEQ ID NO: 10635 - RNA, 24 nt, Artificial Sequence
  Synthetic
cggcguuccgggacgcccggggcc

SEQ ID NO: 10636 - RNA, 18 nt, Artificial Sequence
  Synthetic
aaaacuuuuaccugggcc

SEQ ID NO: 10637 - RNA, 19 nt, Artificial Sequence
  Synthetic
caaaacuuuuaccugggcc

SEQ ID NO: 10638 - RNA, 21 nt, Artificial Sequence
  Synthetic
cccaaaacuuuuaccugggcc

SEQ ID NO: 10639 - RNA, 22 nt, Artificial Sequence
  Synthetic
ccccaaaacuuuuaccugggcc

SEQ ID NO: 10640 - RNA, 23 nt, Artificial Sequence
  Synthetic
uccccaaaacuuuuaccugggcc

SEQ ID NO: 10641 - RNA, 24 nt, Artificial Sequence
  Synthetic
uuccccaaaacuuuuaccugggcc

SEQ ID NO: 10642 - RNA, 18 nt, Artificial Sequence
  Synthetic
ggccgacguggagcugcc

SEQ ID NO: 10643 - RNA, 19 nt, Artificial Sequence
  Synthetic
uggccgacguggagcugcc

SEQ ID NO: 10644 - RNA, 21 nt, Artificial Sequence
  Synthetic
gguggccgacguggagcugcc

SEQ ID NO: 10645 - RNA, 22 nt, Artificial Sequence
  Synthetic
ggguggccgacguggagcugcc

SEQ ID NO: 10646 - RNA, 23 nt, Artificial Sequence
  Synthetic
gggguggccgacguggagcugcc

SEQ ID NO: 10647 - RNA, 24 nt, Artificial Sequence
  Synthetic
ggggguggccgacguggagcugcc

SEQ ID NO: 10648 - RNA, 18 nt, Artificial Sequence
  Synthetic
ccgccaaacaucgcugcc

SEQ ID NO: 10649 - RNA, 19 nt, Artificial Sequence
  Synthetic
gccgccaaacaucgcugcc

SEQ ID NO: 10650 - RNA, 21 nt, Artificial Sequence
  Synthetic
ucgccgccaaacaucgcugcc

SEQ ID NO: 10651 - RNA, 22 nt, Artificial Sequence
  Synthetic
aucgccgccaaacaucgcugcc

SEQ ID NO: 10652 - RNA, 23 nt, Artificial Sequence
  Synthetic
caucgccgccaaacaucgcugcc

SEQ ID NO: 10653 - RNA, 24 nt, Artificial Sequence
  Synthetic
acaucgccgccaaacaucgcugcc

SEQ ID NO: 10654 - RNA, 18 nt, Artificial Sequence
  Synthetic
agcgccccccggggugcc

SEQ ID NO: 10655 - RNA, 19 nt, Artificial Sequence
  Synthetic
aagcgccccccggggugcc

SEQ ID NO: 10656 - RNA, 21 nt, Artificial Sequence
  Synthetic
uuaagcgccccccggggugcc

SEQ ID NO: 10657 - RNA, 22 nt, Artificial Sequence
  Synthetic
uuuaagcgccccccggggugcc

SEQ ID NO: 10658 - RNA, 23 nt, Artificial Sequence
  Synthetic
guuuaagcgccccccggggugcc

SEQ ID NO: 10659 - RNA, 24 nt, Artificial Sequence
  Synthetic
aguuuaagcgccccccggggugcc

SEQ ID NO: 10660 - RNA, 18 nt, Artificial Sequence
  Synthetic
ccgucgugcagcacgucc

SEQ ID NO: 10661 - RNA, 19 nt, Artificial Sequence
  Synthetic
cccgucgugcagcacgucc

SEQ ID NO: 10662 - RNA, 21 nt, Artificial Sequence
  Synthetic
agcccgucgugcagcacgucc

SEQ ID NO: 10663 - RNA, 22 nt, Artificial Sequence
  Synthetic
cagcccgucgugcagcacgucc

SEQ ID NO: 10664 - RNA, 23 nt, Artificial Sequence
  Synthetic
acagcccgucgugcagcacgucc

SEQ ID NO: 10665 - RNA, 24 nt, Artificial Sequence
  Synthetic
gacagcccgucgugcagcacgucc

SEQ ID NO: 10666 - RNA, 18 nt, Artificial Sequence
  Synthetic
ugcagaacaugguggucc

SEQ ID NO: 10667 - RNA, 19 nt, Artificial Sequence
  Synthetic
cugcagaacaugguggucc

SEQ ID NO: 10668 - RNA, 21 nt, Artificial Sequence
  Synthetic
cccugcagaacaugguggucc

SEQ ID NO: 10669 - RNA, 22 nt, Artificial Sequence
  Synthetic
acccugcagaacaugguggucc

SEQ ID NO: 10670 - RNA, 23 nt, Artificial Sequence
  Synthetic
cacccugcagaacaugguggucc

SEQ ID NO: 10671 - RNA, 24 nt, Artificial Sequence
  Synthetic
ccacccugcagaacaugguggucc

SEQ ID NO: 10672 - RNA, 18 nt, Artificial Sequence
  Synthetic
aaaccgccccgcccuucc

SEQ ID NO: 10673 - RNA, 19 nt, Artificial Sequence
  Synthetic
uaaaccgccccgcccuucc

SEQ ID NO: 10674 - RNA, 20 nt, Artificial Sequence
  Synthetic
auaaaccgccccgcccuucc

SEQ ID NO: 10675 - RNA, 21 nt, Artificial Sequence
  Synthetic
aauaaaccgccccgcccuucc

SEQ ID NO: 10676 - RNA, 22 nt, Artificial Sequence
  Synthetic
uaauaaaccgccccgcccuucc

SEQ ID NO: 10677 - RNA, 23 nt, Artificial Sequence
  Synthetic
guaauaaaccgccccgcccuucc

SEQ ID NO: 10678 - RNA, 24 nt, Artificial Sequence
  Synthetic
uguaauaaaccgccccgcccuucc

SEQ ID NO: 10679 - RNA, 18 nt, Artificial Sequence
  Synthetic
ggcagacgcuggacgagc

SEQ ID NO: 10680 - RNA, 19 nt, Artificial Sequence
  Synthetic
cggcagacgcuggacgagc

SEQ ID NO: 10681 - RNA, 21 nt, Artificial Sequence
  Synthetic
accggcagacgcuggacgagc

SEQ ID NO: 10682 - RNA, 22 nt, Artificial Sequence
  Synthetic
aaccggcagacgcuggacgagc

SEQ ID NO: 10683 - RNA, 23 nt, Artificial Sequence
  Synthetic
gaaccggcagacgcuggacgagc

SEQ ID NO: 10684 - RNA, 24 nt, Artificial Sequence
  Synthetic
ugaaccggcagacgcuggacgagc

SEQ ID NO: 10685 - RNA, 18 nt, Artificial Sequence
  Synthetic
acgcccggggccuggagc

SEQ ID NO: 10686 - RNA, 19 nt, Artificial Sequence
  Synthetic
gacgcccggggccuggagc

SEQ ID NO: 10687 - RNA, 21 nt, Artificial Sequence
  Synthetic
gggacgcccggggccuggagc

SEQ ID NO: 10688 - RNA, 22 nt, Artificial Sequence
  Synthetic
cgggacgcccggggccuggagc

SEQ ID NO: 10689 - RNA, 23 nt, Artificial Sequence
  Synthetic
ccgggacgcccggggccuggagc

SEQ ID NO: 10690 - RNA, 24 nt, Artificial Sequence
  Synthetic
uccgggacgcccggggccuggagc

SEQ ID NO: 10691 - RNA, 18 nt, Artificial Sequence
  Synthetic
cgcgacugccggguuagc

SEQ ID NO: 10692 - RNA, 19 nt, Artificial Sequence
  Synthetic
ucgcgacugccggguuagc

SEQ ID NO: 10693 - RNA, 21 nt, Artificial Sequence
  Synthetic
caucgcgacugccggguuagc

SEQ ID NO: 10694 - RNA, 22 nt, Artificial Sequence
  Synthetic
ccaucgcgacugccggguuagc

SEQ ID NO: 10695 - RNA, 23 nt, Artificial Sequence
  Synthetic
gccaucgcgacugccggguuagc

SEQ ID NO: 10696 - RNA, 24 nt, Artificial Sequence
  Synthetic
cgccaucgcgacugccggguuagc

SEQ ID NO: 10697 - RNA, 18 nt, Artificial Sequence
  Synthetic
gcagcuguuuuugaacgc

SEQ ID NO: 10698 - RNA, 19 nt, Artificial Sequence
  Synthetic
agcagcuguuuuugaacgc

SEQ ID NO: 10699 - RNA, 21 nt, Artificial Sequence
  Synthetic
gcagcagcuguuuuugaacgc

SEQ ID NO: 10700 - RNA, 22 nt, Artificial Sequence
  Synthetic
ugcagcagcuguuuuugaacgc

SEQ ID NO: 10701 - RNA, 23 nt, Artificial Sequence
  Synthetic
augcagcagcuguuuuugaacgc

SEQ ID NO: 10702 - RNA, 24 nt, Artificial Sequence
  Synthetic
caugcagcagcuguuuuugaacgc

SEQ ID NO: 10703 - RNA, 18 nt, Artificial Sequence
  Synthetic
ugacgcaugccgacacgc

SEQ ID NO: 10704 - RNA, 19 nt, Artificial Sequence
  Synthetic
cugacgcaugccgacacgc

SEQ ID NO: 10705 - RNA, 21 nt, Artificial Sequence
  Synthetic
gucugacgcaugccgacacgc

SEQ ID NO: 10706 - RNA, 22 nt, Artificial Sequence
  Synthetic
cgucugacgcaugccgacacgc

SEQ ID NO: 10707 - RNA, 23 nt, Artificial Sequence
  Synthetic
ccgucugacgcaugccgacacgc

SEQ ID NO: 10708 - RNA, 24 nt, Artificial Sequence
  Synthetic
cccgucugacgcaugccgacacgc

SEQ ID NO: 10709 - RNA, 18 nt, Artificial Sequence
  Synthetic
caacggggaagcccacgc

SEQ ID NO: 10710 - RNA, 19 nt, Artificial Sequence
  Synthetic
gcaacggggaagcccacgc

SEQ ID NO: 10711 - RNA, 21 nt, Artificial Sequence
  Synthetic
ccgcaacggggaagcccacgc

SEQ ID NO: 10712 - RNA, 22 nt, Artificial Sequence
  Synthetic
cccgcaacggggaagcccacgc

SEQ ID NO: 10713 - RNA, 23 nt, Artificial Sequence
  Synthetic
gcccgcaacggggaagcccacgc

SEQ ID NO: 10714 - RNA, 24 nt, Artificial Sequence
  Synthetic
ugcccgcaacggggaagcccacgc

SEQ ID NO: 10715 - RNA, 18 nt, Artificial Sequence
  Synthetic
acgguuugccgcgcacgc

SEQ ID NO: 10716 - RNA, 19 nt, Artificial Sequence
  Synthetic
aacgguuugccgcgcacgc

SEQ ID NO: 10717 - RNA, 21 nt, Artificial Sequence
  Synthetic
ggaacgguuugccgcgcacgc

SEQ ID NO: 10718 - RNA, 22 nt, Artificial Sequence
  Synthetic
uggaacgguuugccgcgcacgc

SEQ ID NO: 10719 - RNA, 23 nt, Artificial Sequence
  Synthetic
auggaacgguuugccgcgcacgc

SEQ ID NO: 10720 - RNA, 24 nt, Artificial Sequence
  Synthetic
cauggaacgguuugccgcgcacgc

SEQ ID NO: 10721 - RNA, 18 nt, Artificial Sequence
  Synthetic
ggcggcguuccgggacgc

SEQ ID NO: 10722 - RNA, 19 nt, Artificial Sequence
  Synthetic
cggcggcguuccgggacgc

SEQ ID NO: 10723 - RNA, 21 nt, Artificial Sequence
  Synthetic
uccggcggcguuccgggacgc

SEQ ID NO: 10724 - RNA, 22 nt, Artificial Sequence
  Synthetic
guccggcggcguuccgggacgc

SEQ ID NO: 10725 - RNA, 23 nt, Artificial Sequence
  Synthetic
uguccggcggcguuccgggacgc

SEQ ID NO: 10726 - RNA, 24 nt, Artificial Sequence
  Synthetic
auguccggcggcguuccgggacgc

SEQ ID NO: 10727 - RNA, 18 nt, Artificial Sequence
  Synthetic
cgccgggggcguuuacgc

SEQ ID NO: 10728 - RNA, 19 nt, Artificial Sequence
  Synthetic
ccgccgggggcguuuacgc

SEQ ID NO: 10729 - RNA, 21 nt, Artificial Sequence
  Synthetic
cgccgccgggggcguuuacgc

SEQ ID NO: 10730 - RNA, 22 nt, Artificial Sequence
  Synthetic
gcgccgccgggggcguuuacgc

SEQ ID NO: 10731 - RNA, 23 nt, Artificial Sequence
  Synthetic
cgcgccgccgggggcguuuacgc

SEQ ID NO: 10732 - RNA, 24 nt, Artificial Sequence
  Synthetic
acgcgccgccgggggcguuuacgc

SEQ ID NO: 10733 - RNA, 18 nt, Artificial Sequence
  Synthetic
gucguggcgggaaaccgc

SEQ ID NO: 10734 - RNA, 19 nt, Artificial Sequence
  Synthetic
ggucguggcgggaaaccgc

SEQ ID NO: 10735 - RNA, 21 nt, Artificial Sequence
  Synthetic
gcggucguggcgggaaaccgc

SEQ ID NO: 10736 - RNA, 22 nt, Artificial Sequence
  Synthetic
cgcggucguggcgggaaaccgc

SEQ ID NO: 10737 - RNA, 23 nt, Artificial Sequence
  Synthetic
acgcggucguggcgggaaaccgc

SEQ ID NO: 10738 - RNA, 24 nt, Artificial Sequence
  Synthetic
aacgcggucguggcgggaaaccgc

SEQ ID NO: 10739 - RNA, 18 nt, Artificial Sequence
  Synthetic
ggcaaggcgggccaccgc

SEQ ID NO: 10740 - RNA, 19 nt, Artificial Sequence
  Synthetic
gggcaaggcgggccaccgc

SEQ ID NO: 10741 - RNA, 21 nt, Artificial Sequence
  Synthetic
cugggcaaggcgggccaccgc

SEQ ID NO: 10742 - RNA, 22 nt, Artificial Sequence
  Synthetic
ccugggcaaggcgggccaccgc

SEQ ID NO: 10743 - RNA, 23 nt, Artificial Sequence
  Synthetic
uccugggcaaggcgggccaccgc

SEQ ID NO: 10744 - RNA, 24 nt, Artificial Sequence
  Synthetic
uuccugggcaaggcgggccaccgc

SEQ ID NO: 10745 - RNA, 18 nt, Artificial Sequence
  Synthetic
cccccggggacgcgccgc

SEQ ID NO: 10746 - RNA, 19 nt, Artificial Sequence
  Synthetic
acccccggggacgcgccgc

SEQ ID NO: 10747 - RNA, 21 nt, Artificial Sequence
  Synthetic
caacccccggggacgcgccgc

SEQ ID NO: 10748 - RNA, 22 nt, Artificial Sequence
  Synthetic
gcaacccccggggacgcgccgc

SEQ ID NO: 10749 - RNA, 23 nt, Artificial Sequence
  Synthetic
ugcaacccccggggacgcgccgc

SEQ ID NO: 10750 - RNA, 24 nt, Artificial Sequence
  Synthetic
cugcaacccccggggacgcgccgc

SEQ ID NO: 10751 - RNA, 18 nt, Artificial Sequence
  Synthetic
gucgugcagcacguccgc

SEQ ID NO: 10752 - RNA, 19 nt, Artificial Sequence
  Synthetic
cgucgugcagcacguccgc

SEQ ID NO: 10753 - RNA, 21 nt, Artificial Sequence
  Synthetic
cccgucgugcagcacguccgc

SEQ ID NO: 10754 - RNA, 22 nt, Artificial Sequence
  Synthetic
gcccgucgugcagcacguccgc

SEQ ID NO: 10755 - RNA, 23 nt, Artificial Sequence
  Synthetic
agcccgucgugcagcacguccgc

SEQ ID NO: 10756 - RNA, 24 nt, Artificial Sequence
  Synthetic
cagcccgucgugcagcacguccgc

SEQ ID NO: 10757 - RNA, 18 nt, Artificial Sequence
  Synthetic
cgacugccggguuagcgc

SEQ ID NO: 10758 - RNA, 19 nt, Artificial Sequence
  Synthetic
gcgacugccggguuagcgc

SEQ ID NO: 10759 - RNA, 21 nt, Artificial Sequence
  Synthetic
ucgcgacugccggguuagcgc

SEQ ID NO: 10760 - RNA, 22 nt, Artificial Sequence
  Synthetic
aucgcgacugccggguuagcgc

SEQ ID NO: 10761 - RNA, 23 nt, Artificial Sequence
  Synthetic
caucgcgacugccggguuagcgc

SEQ ID NO: 10762 - RNA, 24 nt, Artificial Sequence
  Synthetic
ccaucgcgacugccggguuagcgc

SEQ ID NO: 10763 - RNA, 18 nt, Artificial Sequence
  Synthetic
acggggaagcccacgcgc

SEQ ID NO: 10764 - RNA, 19 nt, Artificial Sequence
  Synthetic
aacggggaagcccacgcgc

SEQ ID NO: 10765 - RNA, 21 nt, Artificial Sequence
  Synthetic
gcaacggggaagcccacgcgc

SEQ ID NO: 10766 - RNA, 22 nt, Artificial Sequence
  Synthetic
cgcaacggggaagcccacgcgc

SEQ ID NO: 10767 - RNA, 23 nt, Artificial Sequence
  Synthetic
ccgcaacggggaagcccacgcgc

SEQ ID NO: 10768 - RNA, 24 nt, Artificial Sequence
  Synthetic
cccgcaacggggaagcccacgcgc

SEQ ID NO: 10769 - RNA, 18 nt, Artificial Sequence
  Synthetic
acgcucacccagccgcgc

SEQ ID NO: 10770 - RNA, 19 nt, Artificial Sequence
  Synthetic
cacgcucacccagccgcgc

SEQ ID NO: 10771 - RNA, 21 nt, Artificial Sequence
  Synthetic
uucacgcucacccagccgcgc

SEQ ID NO: 10772 - RNA, 22 nt, Artificial Sequence
  Synthetic
cuucacgcucacccagccgcgc

SEQ ID NO: 10773 - RNA, 23 nt, Artificial Sequence
  Synthetic
acuucacgcucacccagccgcgc

SEQ ID NO: 10774 - RNA, 24 nt, Artificial Sequence
  Synthetic
aacuucacgcucacccagccgcgc

SEQ ID NO: 10775 - RNA, 18 nt, Artificial Sequence
  Synthetic
cguccacgcgcuguucgc

SEQ ID NO: 10776 - RNA, 19 nt, Artificial Sequence
  Synthetic
ccguccacgcgcuguucgc

SEQ ID NO: 10777 - RNA, 21 nt, Artificial Sequence
  Synthetic
ccccguccacgcgcuguucgc

SEQ ID NO: 10778 - RNA, 22 nt, Artificial Sequence
  Synthetic
uccccguccacgcgcuguucgc

SEQ ID NO: 10779 - RNA, 23 nt, Artificial Sequence
  Synthetic
cuccccguccacgcgcuguucgc

SEQ ID NO: 10780 - RNA, 24 nt, Artificial Sequence
  Synthetic
ccuccccguccacgcgcuguucgc

SEQ ID NO: 10781 - RNA, 18 nt, Artificial Sequence
  Synthetic
gcugcacaacacccaggc

SEQ ID NO: 10782 - RNA, 19 nt, Artificial Sequence
  Synthetic
ugcugcacaacacccaggc

SEQ ID NO: 10783 - RNA, 21 nt, Artificial Sequence
  Synthetic
gcugcugcacaacacccaggc

SEQ ID NO: 10784 - RNA, 22 nt, Artificial Sequence
  Synthetic
agcugcugcacaacacccaggc

SEQ ID NO: 10785 - RNA, 23 nt, Artificial Sequence
  Synthetic
cagcugcugcacaacacccaggc

SEQ ID NO: 10786 - RNA, 24 nt, Artificial Sequence
  Synthetic
ccagcugcugcacaacacccaggc

SEQ ID NO: 10787 - RNA, 18 nt, Artificial Sequence
  Synthetic
cucauguacgaccacggc

SEQ ID NO: 10788 - RNA, 19 nt, Artificial Sequence
  Synthetic
ccucauguacgaccacggc

SEQ ID NO: 10789 - RNA, 21 nt, Artificial Sequence
  Synthetic
gcccucauguacgaccacggc

SEQ ID NO: 10790 - RNA, 22 nt, Artificial Sequence
  Synthetic
cgcccucauguacgaccacggc

SEQ ID NO: 10791 - RNA, 23 nt, Artificial Sequence
  Synthetic
ccgcccucauguacgaccacggc

SEQ ID NO: 10792 - RNA, 24 nt, Artificial Sequence
  Synthetic
accgcccucauguacgaccacggc

SEQ ID NO: 10793 - RNA, 18 nt, Artificial Sequence
  Synthetic
gcagggauggaccacggc

SEQ ID NO: 10794 - RNA, 19 nt, Artificial Sequence
  Synthetic
cgcagggauggaccacggc

SEQ ID NO: 10795 - RNA, 21 nt, Artificial Sequence
  Synthetic
cgcgcagggauggaccacggc

SEQ ID NO: 10796 - RNA, 22 nt, Artificial Sequence
  Synthetic
gcgcgcagggauggaccacggc

SEQ ID NO: 10797 - RNA, 23 nt, Artificial Sequence
  Synthetic
ggcgcgcagggauggaccacggc

SEQ ID NO: 10798 - RNA, 24 nt, Artificial Sequence
  Synthetic
cggcgcgcagggauggaccacggc

SEQ ID NO: 10799 - RNA, 18 nt, Artificial Sequence
  Synthetic
gacuuuacccugaccggc

SEQ ID NO: 10800 - RNA, 19 nt, Artificial Sequence
  Synthetic
ugacuuuacccugaccggc

SEQ ID NO: 10801 - RNA, 21 nt, Artificial Sequence
  Synthetic
gaugacuuuacccugaccggc

SEQ ID NO: 10802 - RNA, 22 nt, Artificial Sequence
  Synthetic
ugaugacuuuacccugaccggc

SEQ ID NO: 10803 - RNA, 23 nt, Artificial Sequence
  Synthetic
uugaugacuuuacccugaccggc

SEQ ID NO: 10804 - RNA, 24 nt, Artificial Sequence
  Synthetic
guugaugacuuuacccugaccggc

SEQ ID NO: 10805 - RNA, 18 nt, Artificial Sequence
  Synthetic
ccggagaucgcccccggc

SEQ ID NO: 10806 - RNA, 19 nt, Artificial Sequence
  Synthetic
cccggagaucgcccccggc

SEQ ID NO: 10807 - RNA, 21 nt, Artificial Sequence
  Synthetic
gucccggagaucgcccccggc

SEQ ID NO: 10808 - RNA, 22 nt, Artificial Sequence
  Synthetic
ggucccggagaucgcccccggc

SEQ ID NO: 10809 - RNA, 23 nt, Artificial Sequence
  Synthetic
uggucccggagaucgcccccggc

SEQ ID NO: 10810 - RNA, 24 nt, Artificial Sequence
  Synthetic
guggucccggagaucgcccccggc

SEQ ID NO: 10811 - RNA, 18 nt, Artificial Sequence
  Synthetic
agcuccagguggcccggc

SEQ ID NO: 10812 - RNA, 19 nt, Artificial Sequence
  Synthetic
cagcuccagguggcccggc

SEQ ID NO: 10813 - RNA, 21 nt, Artificial Sequence
  Synthetic
gccagcuccagguggcccggc

SEQ ID NO: 10814 - RNA, 22 nt, Artificial Sequence
  Synthetic
ggccagcuccagguggcccggc

SEQ ID NO: 10815 - RNA, 23 nt, Artificial Sequence
  Synthetic
gggccagcuccagguggcccggc

SEQ ID NO: 10816 - RNA, 24 nt, Artificial Sequence
  Synthetic
ugggccagcuccagguggcccggc

SEQ ID NO: 10817 - RNA, 18 nt, Artificial Sequence
  Synthetic
gacguucccccggccggc

SEQ ID NO: 10818 - RNA, 19 nt, Artificial Sequence
  Synthetic
ggacguucccccggccggc

SEQ ID NO: 10819 - RNA, 21 nt, Artificial Sequence
  Synthetic
ggggacguucccccggccggc

SEQ ID NO: 10820 - RNA, 22 nt, Artificial Sequence
  Synthetic
gggggacguucccccggccggc

SEQ ID NO: 10821 - RNA, 23 nt, Artificial Sequence
  Synthetic
ggggggacguucccccggccggc

SEQ ID NO: 10822 - RNA, 24 nt, Artificial Sequence
  Synthetic
gggggggacguucccccggccggc

SEQ ID NO: 10823 - RNA, 18 nt, Artificial Sequence
  Synthetic
cguccgcgagagcgcggc

SEQ ID NO: 10824 - RNA, 19 nt, Artificial Sequence
  Synthetic
acguccgcgagagcgcggc

SEQ ID NO: 10825 - RNA, 21 nt, Artificial Sequence
  Synthetic
gcacguccgcgagagcgcggc

SEQ ID NO: 10826 - RNA, 22 nt, Artificial Sequence
  Synthetic
agcacguccgcgagagcgcggc

SEQ ID NO: 10827 - RNA, 23 nt, Artificial Sequence
  Synthetic
cagcacguccgcgagagcgcggc

SEQ ID NO: 10828 - RNA, 24 nt, Artificial Sequence
  Synthetic
gcagcacguccgcgagagcgcggc

SEQ ID NO: 10829 - RNA, 18 nt, Artificial Sequence
  Synthetic
gaucugguguccaucggc

SEQ ID NO: 10830 - RNA, 19 nt, Artificial Sequence
  Synthetic
ggaucugguguccaucggc

SEQ ID NO: 10831 - RNA, 21 nt, Artificial Sequence
  Synthetic
gcggaucugguguccaucggc

SEQ ID NO: 10832 - RNA, 22 nt, Artificial Sequence
  Synthetic
cgcggaucugguguccaucggc

SEQ ID NO: 10833 - RNA, 23 nt, Artificial Sequence
  Synthetic
gcgcggaucugguguccaucggc

SEQ ID NO: 10834 - RNA, 24 nt, Artificial Sequence
  Synthetic
cgcgcggaucugguguccaucggc

SEQ ID NO: 10835 - RNA, 18 nt, Artificial Sequence
  Synthetic
uuccgggacgcccggggc

SEQ ID NO: 10836 - RNA, 19 nt, Artificial Sequence
  Synthetic
guuccgggacgcccggggc

SEQ ID NO: 10837 - RNA, 21 nt, Artificial Sequence
  Synthetic
gcguuccgggacgcccggggc

SEQ ID NO: 10838 - RNA, 22 nt, Artificial Sequence
  Synthetic
ggcguuccgggacgcccggggc

SEQ ID NO: 10839 - RNA, 23 nt, Artificial Sequence
  Synthetic
cggcguuccgggacgcccggggc

SEQ ID NO: 10840 - RNA, 24 nt, Artificial Sequence
  Synthetic
gcggcguuccgggacgcccggggc

SEQ ID NO: 10841 - RNA, 18 nt, Artificial Sequence
  Synthetic
gcgaacguggaccugggc

SEQ ID NO: 10842 - RNA, 19 nt, Artificial Sequence
  Synthetic
cgcgaacguggaccugggc

SEQ ID NO: 10843 - RNA, 21 nt, Artificial Sequence
  Synthetic
cgcgcgaacguggaccugggc

SEQ ID NO: 10844 - RNA, 22 nt, Artificial Sequence
  Synthetic
gcgcgcgaacguggaccugggc

SEQ ID NO: 10845 - RNA, 23 nt, Artificial Sequence
  Synthetic
cgcgcgcgaacguggaccugggc

SEQ ID NO: 10846 - RNA, 24 nt, Artificial Sequence
  Synthetic
ccgcgcgcgaacguggaccugggc

SEQ ID NO: 10847 - RNA, 18 nt, Artificial Sequence
  Synthetic
gcccggcacgaaacuggc

SEQ ID NO: 10848 - RNA, 19 nt, Artificial Sequence
  Synthetic
ggcccggcacgaaacuggc

SEQ ID NO: 10849 - RNA, 21 nt, Artificial Sequence
  Synthetic
guggcccggcacgaaacuggc

SEQ ID NO: 10850 - RNA, 22 nt, Artificial Sequence
  Synthetic
gguggcccggcacgaaacuggc

SEQ ID NO: 10851 - RNA, 23 nt, Artificial Sequence
  Synthetic
agguggcccggcacgaaacuggc

SEQ ID NO: 10852 - RNA, 24 nt, Artificial Sequence
  Synthetic
cagguggcccggcacgaaacuggc

SEQ ID NO: 10853 - RNA, 18 nt, Artificial Sequence
  Synthetic
gcggaacgcggucguggc

SEQ ID NO: 10854 - RNA, 19 nt, Artificial Sequence
  Synthetic
ugcggaacgcggucguggc

SEQ ID NO: 10855 - RNA, 21 nt, Artificial Sequence
  Synthetic
ccugcggaacgcggucguggc

SEQ ID NO: 10856 - RNA, 22 nt, Artificial Sequence
  Synthetic
accugcggaacgcggucguggc

SEQ ID NO: 10857 - RNA, 23 nt, Artificial Sequence
  Synthetic
uaccugcggaacgcggucguggc

SEQ ID NO: 10858 - RNA, 24 nt, Artificial Sequence
  Synthetic
guaccugcggaacgcggucguggc

SEQ ID NO: 10859 - RNA, 18 nt, Artificial Sequence
  Synthetic
ccuggccaccaggguggc

SEQ ID NO: 10860 - RNA, 19 nt, Artificial Sequence
  Synthetic
gccuggccaccaggguggc

SEQ ID NO: 10861 - RNA, 21 nt, Artificial Sequence
  Synthetic
ccgccuggccaccaggguggc

SEQ ID NO: 10862 - RNA, 22 nt, Artificial Sequence
  Synthetic
gccgccuggccaccaggguggc

SEQ ID NO: 10863 - RNA, 23 nt, Artificial Sequence
  Synthetic
ggccgccuggccaccaggguggc

SEQ ID NO: 10864 - RNA, 24 nt, Artificial Sequence
  Synthetic
cggccgccuggccaccaggguggc

SEQ ID NO: 10865 - RNA, 18 nt, Artificial Sequence
  Synthetic
gccaccugcuggagaugc

SEQ ID NO: 10866 - RNA, 19 nt, Artificial Sequence
  Synthetic
cgccaccugcuggagaugc

SEQ ID NO: 10867 - RNA, 21 nt, Artificial Sequence
  Synthetic
gccgccaccugcuggagaugc

SEQ ID NO: 10868 - RNA, 22 nt, Artificial Sequence
  Synthetic
ggccgccaccugcuggagaugc

SEQ ID NO: 10869 - RNA, 23 nt, Artificial Sequence
  Synthetic
gggccgccaccugcuggagaugc

SEQ ID NO: 10870 - RNA, 24 nt, Artificial Sequence
  Synthetic
ugggccgccaccugcuggagaugc

SEQ ID NO: 10871 - RNA, 18 nt, Artificial Sequence
  Synthetic
acgugggccgccaccugc

SEQ ID NO: 10872 - RNA, 19 nt, Artificial Sequence
  Synthetic
gacgugggccgccaccugc

SEQ ID NO: 10873 - RNA, 21 nt, Artificial Sequence
  Synthetic
acgacgugggccgccaccugc

SEQ ID NO: 10874 - RNA, 22 nt, Artificial Sequence
  Synthetic
gacgacgugggccgccaccugc

SEQ ID NO: 10875 - RNA, 23 nt, Artificial Sequence
  Synthetic
ggacgacgugggccgccaccugc

SEQ ID NO: 10876 - RNA, 24 nt, Artificial Sequence
  Synthetic
uggacgacgugggccgccaccugc

SEQ ID NO: 10877 - RNA, 18 nt, Artificial Sequence
  Synthetic
uggccgacguggagcugc

SEQ ID NO: 10878 - RNA, 19 nt, Artificial Sequence
  Synthetic
guggccgacguggagcugc

SEQ ID NO: 10879 - RNA, 21 nt, Artificial Sequence
  Synthetic
ggguggccgacguggagcugc

SEQ ID NO: 10880 - RNA, 22 nt, Artificial Sequence
  Synthetic
gggguggccgacguggagcugc

SEQ ID NO: 10881 - RNA, 23 nt, Artificial Sequence
  Synthetic
ggggguggccgacguggagcugc

SEQ ID NO: 10882 - RNA, 24 nt, Artificial Sequence
  Synthetic
uggggguggccgacguggagcugc

SEQ ID NO: 10883 - RNA, 18 nt, Artificial Sequence
  Synthetic
gccgccaaacaucgcugc

SEQ ID NO: 10884 - RNA, 19 nt, Artificial Sequence
  Synthetic
cgccgccaaacaucgcugc

SEQ ID NO: 10885 - RNA, 21 nt, Artificial Sequence
  Synthetic
aucgccgccaaacaucgcugc

SEQ ID NO: 10886 - RNA, 22 nt, Artificial Sequence
  Synthetic
caucgccgccaaacaucgcugc

SEQ ID NO: 10887 - RNA, 23 nt, Artificial Sequence
  Synthetic
acaucgccgccaaacaucgcugc

SEQ ID NO: 10888 - RNA, 24 nt, Artificial Sequence
  Synthetic
gacaucgccgccaaacaucgcugc

SEQ ID NO: 10889 - RNA, 18 nt, Artificial Sequence
  Synthetic
agaugcugcacgugcugc

SEQ ID NO: 10890 - RNA, 19 nt, Artificial Sequence
  Synthetic
cagaugcugcacgugcugc

SEQ ID NO: 10891 - RNA, 21 nt, Artificial Sequence
  Synthetic
accagaugcugcacgugcugc

SEQ ID NO: 10892 - RNA, 22 nt, Artificial Sequence
  Synthetic
gaccagaugcugcacgugcugc

SEQ ID NO: 10893 - RNA, 23 nt, Artificial Sequence
  Synthetic
cgaccagaugcugcacgugcugc

SEQ ID NO: 10894 - RNA, 24 nt, Artificial Sequence
  Synthetic
ccgaccagaugcugcacgugcugc

SEQ ID NO: 10895 - RNA, 18 nt, Artificial Sequence
  Synthetic
ugccuggagcgccugauc

SEQ ID NO: 10896 - RNA, 19 nt, Artificial Sequence
  Synthetic
cugccuggagcgccugauc

SEQ ID NO: 10897 - RNA, 21 nt, Artificial Sequence
  Synthetic
cgcugccuggagcgccugauc

SEQ ID NO: 10898 - RNA, 22 nt, Artificial Sequence
  Synthetic
ucgcugccuggagcgccugauc

SEQ ID NO: 10899 - RNA, 23 nt, Artificial Sequence
  Synthetic
aucgcugccuggagcgccugauc

SEQ ID NO: 10900 - RNA, 24 nt, Artificial Sequence
  Synthetic
caucgcugccuggagcgccugauc

SEQ ID NO: 10901 - RNA, 18 nt, Artificial Sequence
  Synthetic
ccggggugccgcgaacuc

SEQ ID NO: 10902 - RNA, 19 nt, Artificial Sequence
  Synthetic
cccggggugccgcgaacuc

SEQ ID NO: 10903 - RNA, 21 nt, Artificial Sequence
  Synthetic
cccccggggugccgcgaacuc

SEQ ID NO: 10904 - RNA, 22 nt, Artificial Sequence
  Synthetic
ccccccggggugccgcgaacuc

SEQ ID NO: 10905 - RNA, 23 nt, Artificial Sequence
  Synthetic
gccccccggggugccgcgaacuc

SEQ ID NO: 10906 - RNA, 24 nt, Artificial Sequence
  Synthetic
cgccccccggggugccgcgaacuc

SEQ ID NO: 10907 - RNA, 18 nt, Artificial Sequence
  Synthetic
uacgucgugaccuaccuc

SEQ ID NO: 10908 - RNA, 19 nt, Artificial Sequence
  Synthetic
guacgucgugaccuaccuc

SEQ ID NO: 10909 - RNA, 21 nt, Artificial Sequence
  Synthetic
ucguacgucgugaccuaccuc

SEQ ID NO: 10910 - RNA, 22 nt, Artificial Sequence
  Synthetic
cucguacgucgugaccuaccuc

SEQ ID NO: 10911 - RNA, 23 nt, Artificial Sequence
  Synthetic
ucucguacgucgugaccuaccuc

SEQ ID NO: 10912 - RNA, 24 nt, Artificial Sequence
  Synthetic
gucucguacgucgugaccuaccuc

SEQ ID NO: 10913 - RNA, 18 nt, Artificial Sequence
  Synthetic
cagacgcuggacgagcuc

SEQ ID NO: 10914 - RNA, 19 nt, Artificial Sequence
  Synthetic
gcagacgcuggacgagcuc

SEQ ID NO: 10915 - RNA, 21 nt, Artificial Sequence
  Synthetic
cggcagacgcuggacgagcuc

SEQ ID NO: 10916 - RNA, 22 nt, Artificial Sequence
  Synthetic
ccggcagacgcuggacgagcuc

SEQ ID NO: 10917 - RNA, 23 nt, Artificial Sequence
  Synthetic
accggcagacgcuggacgagcuc

SEQ ID NO: 10918 - RNA, 24 nt, Artificial Sequence
  Synthetic
aaccggcagacgcuggacgagcuc

SEQ ID NO: 10919 - RNA, 18 nt, Artificial Sequence
  Synthetic
uaugacgcauccccgcuc

SEQ ID NO: 10920 - RNA, 19 nt, Artificial Sequence
  Synthetic
cuaugacgcauccccgcuc

SEQ ID NO: 10921 - RNA, 21 nt, Artificial Sequence
  Synthetic
gucuaugacgcauccccgcuc

SEQ ID NO: 10922 - RNA, 22 nt, Artificial Sequence
  Synthetic
cgucuaugacgcauccccgcuc

SEQ ID NO: 10923 - RNA, 23 nt, Artificial Sequence
  Synthetic
ucgucuaugacgcauccccgcuc

SEQ ID NO: 10924 - RNA, 24 nt, Artificial Sequence
  Synthetic
cucgucuaugacgcauccccgcuc

SEQ ID NO: 10925 - RNA, 18 nt, Artificial Sequence
  Synthetic
cccugguccccccggcuc

SEQ ID NO: 10926 - RNA, 19 nt, Artificial Sequence
  Synthetic
ccccugguccccccggcuc

SEQ ID NO: 10927 - RNA, 21 nt, Artificial Sequence
  Synthetic
ucccccugguccccccggcuc

SEQ ID NO: 10928 - RNA, 22 nt, Artificial Sequence
  Synthetic
gucccccugguccccccggcuc

SEQ ID NO: 10929 - RNA, 23 nt, Artificial Sequence
  Synthetic
ggucccccugguccccccggcuc

SEQ ID NO: 10930 - RNA, 24 nt, Artificial Sequence
  Synthetic
aggucccccugguccccccggcuc

SEQ ID NO: 10931 - RNA, 18 nt, Artificial Sequence
  Synthetic
acaacgccaaccuggcuc

SEQ ID NO: 10932 - RNA, 19 nt, Artificial Sequence
  Synthetic
gacaacgccaaccuggcuc

SEQ ID NO: 10933 - RNA, 21 nt, Artificial Sequence
  Synthetic
ccgacaacgccaaccuggcuc

SEQ ID NO: 10934 - RNA, 22 nt, Artificial Sequence
  Synthetic
cccgacaacgccaaccuggcuc

SEQ ID NO: 10935 - RNA, 23 nt, Artificial Sequence
  Synthetic
gcccgacaacgccaaccuggcuc

SEQ ID NO: 10936 - RNA, 24 nt, Artificial Sequence
  Synthetic
agcccgacaacgccaaccuggcuc

SEQ ID NO: 10937 - RNA, 18 nt, Artificial Sequence
  Synthetic
gccgucgaggccuggcuc

SEQ ID NO: 10938 - RNA, 19 nt, Artificial Sequence
  Synthetic
ggccgucgaggccuggcuc

SEQ ID NO: 10939 - RNA, 21 nt, Artificial Sequence
  Synthetic
gaggccgucgaggccuggcuc

SEQ ID NO: 10940 - RNA, 22 nt, Artificial Sequence
  Synthetic
ggaggccgucgaggccuggcuc

SEQ ID NO: 10941 - RNA, 23 nt, Artificial Sequence
  Synthetic
gggaggccgucgaggccuggcuc

SEQ ID NO: 10942 - RNA, 24 nt, Artificial Sequence
  Synthetic
cgggaggccgucgaggccuggcuc

SEQ ID NO: 10943 - RNA, 18 nt, Artificial Sequence
  Synthetic
cgcggggcucccccucuc

SEQ ID NO: 10944 - RNA, 19 nt, Artificial Sequence
  Synthetic
ccgcggggcucccccucuc

SEQ ID NO: 10945 - RNA, 21 nt, Artificial Sequence
  Synthetic
ggccgcggggcucccccucuc

SEQ ID NO: 10946 - RNA, 22 nt, Artificial Sequence
  Synthetic
gggccgcggggcucccccucuc

SEQ ID NO: 10947 - RNA, 23 nt, Artificial Sequence
  Synthetic
ugggccgcggggcucccccucuc

SEQ ID NO: 10948 - RNA, 24 nt, Artificial Sequence
  Synthetic
cugggccgcggggcucccccucuc

SEQ ID NO: 10949 - RNA, 18 nt, Artificial Sequence
  Synthetic
aggugcugcgccugucuc

SEQ ID NO: 10950 - RNA, 19 nt, Artificial Sequence
  Synthetic
caggugcugcgccugucuc

SEQ ID NO: 10951 - RNA, 21 nt, Artificial Sequence
  Synthetic
gccaggugcugcgccugucuc

SEQ ID NO: 10952 - RNA, 22 nt, Artificial Sequence
  Synthetic
cgccaggugcugcgccugucuc

SEQ ID NO: 10953 - RNA, 23 nt, Artificial Sequence
  Synthetic
ccgccaggugcugcgccugucuc

SEQ ID NO: 10954 - RNA, 24 nt, Artificial Sequence
  Synthetic
accgccaggugcugcgccugucuc

SEQ ID NO: 10955 - RNA, 18 nt, Artificial Sequence
  Synthetic
gauggugcccgccuucuc

SEQ ID NO: 10956 - RNA, 19 nt, Artificial Sequence
  Synthetic
ugauggugcccgccuucuc

SEQ ID NO: 10957 - RNA, 21 nt, Artificial Sequence
  Synthetic
cgugauggugcccgccuucuc

SEQ ID NO: 10958 - RNA, 22 nt, Artificial Sequence
  Synthetic
acgugauggugcccgccuucuc

SEQ ID NO: 10959 - RNA, 23 nt, Artificial Sequence
  Synthetic
uacgugauggugcccgccuucuc

SEQ ID NO: 10960 - RNA, 24 nt, Artificial Sequence
  Synthetic
cuacgugauggugcccgccuucuc

SEQ ID NO: 10961 - RNA, 18 nt, Artificial Sequence
  Synthetic
cggccagagcgacccguc

SEQ ID NO: 10962 - RNA, 19 nt, Artificial Sequence
  Synthetic
acggccagagcgacccguc

SEQ ID NO: 10963 - RNA, 21 nt, Artificial Sequence
  Synthetic
ccacggccagagcgacccguc

SEQ ID NO: 10964 - RNA, 22 nt, Artificial Sequence
  Synthetic
accacggccagagcgacccguc

SEQ ID NO: 10965 - RNA, 23 nt, Artificial Sequence
  Synthetic
gaccacggccagagcgacccguc

SEQ ID NO: 10966 - RNA, 24 nt, Artificial Sequence
  Synthetic
cgaccacggccagagcgacccguc

SEQ ID NO: 10967 - RNA, 18 nt, Artificial Sequence
  Synthetic
ggccuguucaauccgguc

SEQ ID NO: 10968 - RNA, 19 nt, Artificial Sequence
  Synthetic
gggccuguucaauccgguc

SEQ ID NO: 10969 - RNA, 21 nt, Artificial Sequence
  Synthetic
cugggccuguucaauccgguc

SEQ ID NO: 10970 - RNA, 22 nt, Artificial Sequence
  Synthetic
ccugggccuguucaauccgguc

SEQ ID NO: 10971 - RNA, 23 nt, Artificial Sequence
  Synthetic
cccugggccuguucaauccgguc

SEQ ID NO: 10972 - RNA, 24 nt, Artificial Sequence
  Synthetic
ccccugggccuguucaauccgguc

SEQ ID NO: 10973 - RNA, 18 nt, Artificial Sequence
  Synthetic
aacguugacgcggcgguc

SEQ ID NO: 10974 - RNA, 19 nt, Artificial Sequence
  Synthetic
gaacguugacgcggcgguc

SEQ ID NO: 10975 - RNA, 21 nt, Artificial Sequence
  Synthetic
augaacguugacgcggcgguc

SEQ ID NO: 10976 - RNA, 22 nt, Artificial Sequence
  Synthetic
gaugaacguugacgcggcgguc

SEQ ID NO: 10977 - RNA, 23 nt, Artificial Sequence
  Synthetic
ugaugaacguugacgcggcgguc

SEQ ID NO: 10978 - RNA, 24 nt, Artificial Sequence
  Synthetic
cugaugaacguugacgcggcgguc

SEQ ID NO: 10979 - RNA, 18 nt, Artificial Sequence
  Synthetic
gggcggguccgauggguc

SEQ ID NO: 10980 - RNA, 19 nt, Artificial Sequence
  Synthetic
cgggcggguccgauggguc

SEQ ID NO: 10981 - RNA, 21 nt, Artificial Sequence
  Synthetic
cacgggcggguccgauggguc

SEQ ID NO: 10982 - RNA, 22 nt, Artificial Sequence
  Synthetic
ccacgggcggguccgauggguc

SEQ ID NO: 10983 - RNA, 23 nt, Artificial Sequence
  Synthetic
cccacgggcggguccgauggguc

SEQ ID NO: 10984 - RNA, 24 nt, Artificial Sequence
  Synthetic
gcccacgggcggguccgauggguc

SEQ ID NO: 10985 - RNA, 18 nt, Artificial Sequence
  Synthetic
acguacggcgagaugguc

SEQ ID NO: 10986 - RNA, 19 nt, Artificial Sequence
  Synthetic
gacguacggcgagaugguc

SEQ ID NO: 10987 - RNA, 21 nt, Artificial Sequence
  Synthetic
gugacguacggcgagaugguc

SEQ ID NO: 10988 - RNA, 22 nt, Artificial Sequence
  Synthetic
ggugacguacggcgagaugguc

SEQ ID NO: 10989 - RNA, 23 nt, Artificial Sequence
  Synthetic
cggugacguacggcgagaugguc

SEQ ID NO: 10990 - RNA, 24 nt, Artificial Sequence
  Synthetic
ccggugacguacggcgagaugguc

SEQ ID NO: 10991 - RNA, 18 nt, Artificial Sequence
  Synthetic
cugcagaacauggugguc

SEQ ID NO: 10992 - RNA, 19 nt, Artificial Sequence
  Synthetic
ccugcagaacauggugguc

SEQ ID NO: 10993 - RNA, 21 nt, Artificial Sequence
  Synthetic
acccugcagaacauggugguc

SEQ ID NO: 10994 - RNA, 22 nt, Artificial Sequence
  Synthetic
cacccugcagaacauggugguc

SEQ ID NO: 10995 - RNA, 23 nt, Artificial Sequence
  Synthetic
ccacccugcagaacauggugguc

SEQ ID NO: 10996 - RNA, 24 nt, Artificial Sequence
  Synthetic
gccacccugcagaacauggugguc

SEQ ID NO: 10997 - RNA, 18 nt, Artificial Sequence
  Synthetic
gcgucggaggcguacuuc

SEQ ID NO: 10998 - RNA, 19 nt, Artificial Sequence
  Synthetic
cgcgucggaggcguacuuc

SEQ ID NO: 10999 - RNA, 21 nt, Artificial Sequence
  Synthetic
cgcgcgucggaggcguacuuc

SEQ ID NO: 11000 - RNA, 22 nt, Artificial Sequence
  Synthetic
gcgcgcgucggaggcguacuuc

SEQ ID NO: 11001 - RNA, 23 nt, Artificial Sequence
  Synthetic
agcgcgcgucggaggcguacuuc

SEQ ID NO: 11002 - RNA, 24 nt, Artificial Sequence
  Synthetic
gagcgcgcgucggaggcguacuuc

SEQ ID NO: 11003 - RNA, 18 nt, Artificial Sequence
  Synthetic
accucgggggagaccuuc

SEQ ID NO: 11004 - RNA, 19 nt, Artificial Sequence
  Synthetic
uaccucgggggagaccuuc

SEQ ID NO: 11005 - RNA, 21 nt, Artificial Sequence
  Synthetic
ccuaccucgggggagaccuuc

SEQ ID NO: 11006 - RNA, 22 nt, Artificial Sequence
  Synthetic
accuaccucgggggagaccuuc

SEQ ID NO: 11007 - RNA, 23 nt, Artificial Sequence
  Synthetic
gaccuaccucgggggagaccuuc

SEQ ID NO: 11008 - RNA, 24 nt, Artificial Sequence
  Synthetic
ugaccuaccucgggggagaccuuc

SEQ ID NO: 11009 - RNA, 18 nt, Artificial Sequence
  Synthetic
cgccuccugcaguccuuc

SEQ ID NO: 11010 - RNA, 19 nt, Artificial Sequence
  Synthetic
gcgccuccugcaguccuuc

SEQ ID NO: 11011 - RNA, 21 nt, Artificial Sequence
  Synthetic
cagcgccuccugcaguccuuc

SEQ ID NO: 11012 - RNA, 22 nt, Artificial Sequence
  Synthetic
acagcgccuccugcaguccuuc

SEQ ID NO: 11013 - RNA, 23 nt, Artificial Sequence
  Synthetic
aacagcgccuccugcaguccuuc

SEQ ID NO: 11014 - RNA, 24 nt, Artificial Sequence
  Synthetic
aaacagcgccuccugcaguccuuc

SEQ ID NO: 11015 - RNA, 18 nt, Artificial Sequence
  Synthetic
ccaccaucgccgccguuc

SEQ ID NO: 11016 - RNA, 19 nt, Artificial Sequence
  Synthetic
gccaccaucgccgccguuc

SEQ ID NO: 11017 - RNA, 21 nt, Artificial Sequence
  Synthetic
ccgccaccaucgccgccguuc

SEQ ID NO: 11018 - RNA, 22 nt, Artificial Sequence
  Synthetic
cccgccaccaucgccgccguuc

SEQ ID NO: 11019 - RNA, 23 nt, Artificial Sequence
  Synthetic
ccccgccaccaucgccgccguuc

SEQ ID NO: 11020 - RNA, 24 nt, Artificial Sequence
  Synthetic
cccccgccaccaucgccgccguuc

SEQ ID NO: 11021 - RNA, 18 nt, Artificial Sequence
  Synthetic
acgcggugcgcggcguuc

SEQ ID NO: 11022 - RNA, 19 nt, Artificial Sequence
  Synthetic
cacgcggugcgcggcguuc

SEQ ID NO: 11023 - RNA, 21 nt, Artificial Sequence
  Synthetic
aacacgcggugcgcggcguuc

SEQ ID NO: 11024 - RNA, 22 nt, Artificial Sequence
  Synthetic
caacacgcggugcgcggcguuc

SEQ ID NO: 11025 - RNA, 23 nt, Artificial Sequence
  Synthetic
acaacacgcggugcgcggcguuc

SEQ ID NO: 11026 - RNA, 24 nt, Artificial Sequence
  Synthetic
aacaacacgcggugcgcggcguuc

SEQ ID NO: 11027 - RNA, 18 nt, Artificial Sequence
  Synthetic
cuauguccggcggcguuc

SEQ ID NO: 11028 - RNA, 19 nt, Artificial Sequence
  Synthetic
gcuauguccggcggcguuc

SEQ ID NO: 11029 - RNA, 21 nt, Artificial Sequence
  Synthetic
gcgcuauguccggcggcguuc

SEQ ID NO: 11030 - RNA, 22 nt, Artificial Sequence
  Synthetic
ggcgcuauguccggcggcguuc

SEQ ID NO: 11031 - RNA, 23 nt, Artificial Sequence
  Synthetic
uggcgcuauguccggcggcguuc

SEQ ID NO: 11032 - RNA, 24 nt, Artificial Sequence
  Synthetic
cuggcgcuauguccggcggcguuc

SEQ ID NO: 11033 - RNA, 18 nt, Artificial Sequence
  Synthetic
acugagaacgugcuguuc

SEQ ID NO: 11034 - RNA, 19 nt, Artificial Sequence
  Synthetic
gacugagaacgugcuguuc

SEQ ID NO: 11035 - RNA, 21 nt, Artificial Sequence
  Synthetic
gugacugagaacgugcuguuc

SEQ ID NO: 11036 - RNA, 22 nt, Artificial Sequence
  Synthetic
ugugacugagaacgugcuguuc

SEQ ID NO: 11037 - RNA, 23 nt, Artificial Sequence
  Synthetic
uugugacugagaacgugcuguuc

SEQ ID NO: 11038 - RNA, 24 nt, Artificial Sequence
  Synthetic
uuugugacugagaacgugcuguuc

SEQ ID NO: 11039 - RNA, 18 nt, Artificial Sequence
  Synthetic
gcgagaagcuggucuuuc

SEQ ID NO: 11040 - RNA, 19 nt, Artificial Sequence
  Synthetic
ggcgagaagcuggucuuuc

SEQ ID NO: 11041 - RNA, 21 nt, Artificial Sequence
  Synthetic
ucggcgagaagcuggucuuuc

SEQ ID NO: 11042 - RNA, 22 nt, Artificial Sequence
  Synthetic
aucggcgagaagcuggucuuuc

SEQ ID NO: 11043 - RNA, 23 nt, Artificial Sequence
  Synthetic
caucggcgagaagcuggucuuuc

SEQ ID NO: 11044 - RNA, 24 nt, Artificial Sequence
  Synthetic
ccaucggcgagaagcuggucuuuc

SEQ ID NO: 11045 - RNA, 18 nt, Artificial Sequence
  Synthetic
acccguguggccuguuuc

SEQ ID NO: 11046 - RNA, 19 nt, Artificial Sequence
  Synthetic
gacccguguggccuguuuc

SEQ ID NO: 11047 - RNA, 21 nt, Artificial Sequence
  Synthetic
aggacccguguggccuguuuc

SEQ ID NO: 11048 - RNA, 22 nt, Artificial Sequence
  Synthetic
gaggacccguguggccuguuuc

SEQ ID NO: 11049 - RNA, 23 nt, Artificial Sequence
  Synthetic
ggaggacccguguggccuguuuc

SEQ ID NO: 11050 - RNA, 24 nt, Artificial Sequence
  Synthetic
uggaggacccguguggccuguuuc

SEQ ID NO: 11051 - RNA, 18 nt, Artificial Sequence
  Synthetic
ugcgagacgagcuuuuuc

SEQ ID NO: 11052 - RNA, 19 nt, Artificial Sequence
  Synthetic
cugcgagacgagcuuuuuc

SEQ ID NO: 11053 - RNA, 21 nt, Artificial Sequence
  Synthetic
uucugcgagacgagcuuuuuc

SEQ ID NO: 11054 - RNA, 22 nt, Artificial Sequence
  Synthetic
cuucugcgagacgagcuuuuuc

SEQ ID NO: 11055 - RNA, 23 nt, Artificial Sequence
  Synthetic
gcuucugcgagacgagcuuuuuc

SEQ ID NO: 11056 - RNA, 24 nt, Artificial Sequence
  Synthetic
agcuucugcgagacgagcuuuuuc

SEQ ID NO: 11057 - RNA, 18 nt, Artificial Sequence
  Synthetic
ugcaguccuuccugaaag

SEQ ID NO: 11058 - RNA, 19 nt, Artificial Sequence
  Synthetic
cugcaguccuuccugaaag

SEQ ID NO: 11059 - RNA, 21 nt, Artificial Sequence
  Synthetic
uccugcaguccuuccugaaag

SEQ ID NO: 11060 - RNA, 22 nt, Artificial Sequence
  Synthetic
cuccugcaguccuuccugaaag

SEQ ID NO: 11061 - RNA, 23 nt, Artificial Sequence
  Synthetic
ccuccugcaguccuuccugaaag

SEQ ID NO: 11062 - RNA, 24 nt, Artificial Sequence
  Synthetic
gccuccugcaguccuuccugaaag

SEQ ID NO: 11063 - RNA, 18 nt, Artificial Sequence
  Synthetic
guuuacgcgggggacaag

SEQ ID NO: 11064 - RNA, 19 nt, Artificial Sequence
  Synthetic
cguuuacgcgggggacaag

SEQ ID NO: 11065 - RNA, 21 nt, Artificial Sequence
  Synthetic
ggcguuuacgcgggggacaag

SEQ ID NO: 11066 - RNA, 22 nt, Artificial Sequence
  Synthetic
gggcguuuacgcgggggacaag

SEQ ID NO: 11067 - RNA, 23 nt, Artificial Sequence
  Synthetic
ggggcguuuacgcgggggacaag

SEQ ID NO: 11068 - RNA, 24 nt, Artificial Sequence
  Synthetic
gggggcguuuacgcgggggacaag

SEQ ID NO: 11069 - RNA, 18 nt, Artificial Sequence
  Synthetic
ugggcgggcaggcgcaag

SEQ ID NO: 11070 - RNA, 19 nt, Artificial Sequence
  Synthetic
cugggcgggcaggcgcaag

SEQ ID NO: 11071 - RNA, 21 nt, Artificial Sequence
  Synthetic
agcugggcgggcaggcgcaag

SEQ ID NO: 11072 - RNA, 22 nt, Artificial Sequence
  Synthetic
gagcugggcgggcaggcgcaag

SEQ ID NO: 11073 - RNA, 23 nt, Artificial Sequence
  Synthetic
ggagcugggcgggcaggcgcaag

SEQ ID NO: 11074 - RNA, 24 nt, Artificial Sequence
  Synthetic
cggagcugggcgggcaggcgcaag

SEQ ID NO: 11075 - RNA, 18 nt, Artificial Sequence
  Synthetic
agcuuuuuccugggcaag

SEQ ID NO: 11076 - RNA, 19 nt, Artificial Sequence
  Synthetic
gagcuuuuuccugggcaag

SEQ ID NO: 11077 - RNA, 21 nt, Artificial Sequence
  Synthetic
acgagcuuuuuccugggcaag

SEQ ID NO: 11078 - RNA, 22 nt, Artificial Sequence
  Synthetic
gacgagcuuuuuccugggcaag

SEQ ID NO: 11079 - RNA, 23 nt, Artificial Sequence
  Synthetic
agacgagcuuuuuccugggcaag

SEQ ID NO: 11080 - RNA, 24 nt, Artificial Sequence
  Synthetic
gagacgagcuuuuuccugggcaag

SEQ ID NO: 11081 - RNA, 18 nt, Artificial Sequence
  Synthetic
uugcaucaucagcucaag

SEQ ID NO: 11082 - RNA, 19 nt, Artificial Sequence
  Synthetic
cuugcaucaucagcucaag

SEQ ID NO: 11083 - RNA, 21 nt, Artificial Sequence
  Synthetic
gccuugcaucaucagcucaag

SEQ ID NO: 11084 - RNA, 22 nt, Artificial Sequence
  Synthetic
ggccuugcaucaucagcucaag

SEQ ID NO: 11085 - RNA, 23 nt, Artificial Sequence
  Synthetic
uggccuugcaucaucagcucaag

SEQ ID NO: 11086 - RNA, 24 nt, Artificial Sequence
  Synthetic
guggccuugcaucaucagcucaag

SEQ ID NO: 11087 - RNA, 18 nt, Artificial Sequence
  Synthetic
caccugcuggagaugcag

SEQ ID NO: 11088 - RNA, 19 nt, Artificial Sequence
  Synthetic
ccaccugcuggagaugcag

SEQ ID NO: 11089 - RNA, 21 nt, Artificial Sequence
  Synthetic
cgccaccugcuggagaugcag

SEQ ID NO: 11090 - RNA, 22 nt, Artificial Sequence
  Synthetic
ccgccaccugcuggagaugcag

SEQ ID NO: 11091 - RNA, 23 nt, Artificial Sequence
  Synthetic
gccgccaccugcuggagaugcag

SEQ ID NO: 11092 - RNA, 24 nt, Artificial Sequence
  Synthetic
ggccgccaccugcuggagaugcag

SEQ ID NO: 11093 - RNA, 18 nt, Artificial Sequence
  Synthetic
aagcgaagcuucugcgag

SEQ ID NO: 11094 - RNA, 19 nt, Artificial Sequence
  Synthetic
aaagcgaagcuucugcgag

SEQ ID NO: 11095 - RNA, 21 nt, Artificial Sequence
  Synthetic
cuaaagcgaagcuucugcgag

SEQ ID NO: 11096 - RNA, 22 nt, Artificial Sequence
  Synthetic
gcuaaagcgaagcuucugcgag

SEQ ID NO: 11097 - RNA, 23 nt, Artificial Sequence
  Synthetic
agcuaaagcgaagcuucugcgag

SEQ ID NO: 11098 - RNA, 24 nt, Artificial Sequence
  Synthetic
gagcuaaagcgaagcuucugcgag

SEQ ID NO: 11099 - RNA, 18 nt, Artificial Sequence
  Synthetic
acccugaccggcccggag

SEQ ID NO: 11100 - RNA, 19 nt, Artificial Sequence
  Synthetic
uacccugaccggcccggag

SEQ ID NO: 11101 - RNA, 21 nt, Artificial Sequence
  Synthetic
uuuacccugaccggcccggag

SEQ ID NO: 11102 - RNA, 22 nt, Artificial Sequence
  Synthetic
cuuuacccugaccggcccggag

SEQ ID NO: 11103 - RNA, 23 nt, Artificial Sequence
  Synthetic
acuuuacccugaccggcccggag

SEQ ID NO: 11104 - RNA, 24 nt, Artificial Sequence
  Synthetic
gacuuuacccugaccggcccggag

SEQ ID NO: 11105 - RNA, 18 nt, Artificial Sequence
  Synthetic
gacgcccggggccuggag

SEQ ID NO: 11106 - RNA, 19 nt, Artificial Sequence
  Synthetic
ggacgcccggggccuggag

SEQ ID NO: 11107 - RNA, 21 nt, Artificial Sequence
  Synthetic
cgggacgcccggggccuggag

SEQ ID NO: 11108 - RNA, 22 nt, Artificial Sequence
  Synthetic
ccgggacgcccggggccuggag

SEQ ID NO: 11109 - RNA, 23 nt, Artificial Sequence
  Synthetic
uccgggacgcccggggccuggag

SEQ ID NO: 11110 - RNA, 24 nt, Artificial Sequence
  Synthetic
uuccgggacgcccggggccuggag

SEQ ID NO: 11111 - RNA, 18 nt, Artificial Sequence
  Synthetic
uccgcagugcccgcaacg

SEQ ID NO: 11112 - RNA, 19 nt, Artificial Sequence
  Synthetic
cuccgcagugcccgcaacg

SEQ ID NO: 11113 - RNA, 21 nt, Artificial Sequence
  Synthetic
uccuccgcagugcccgcaacg

SEQ ID NO: 11114 - RNA, 22 nt, Artificial Sequence
  Synthetic
cuccuccgcagugcccgcaacg

SEQ ID NO: 11115 - RNA, 23 nt, Artificial Sequence
  Synthetic
ccuccuccgcagugcccgcaacg

SEQ ID NO: 11116 - RNA, 24 nt, Artificial Sequence
  Synthetic
cccuccuccgcagugcccgcaacg

SEQ ID NO: 11117 - RNA, 18 nt, Artificial Sequence
  Synthetic
aacgguuugccgcgcacg

SEQ ID NO: 11118 - RNA, 19 nt, Artificial Sequence
  Synthetic
gaacgguuugccgcgcacg

SEQ ID NO: 11119 - RNA, 21 nt, Artificial Sequence
  Synthetic
uggaacgguuugccgcgcacg

SEQ ID NO: 11120 - RNA, 22 nt, Artificial Sequence
  Synthetic
auggaacgguuugccgcgcacg

SEQ ID NO: 11121 - RNA, 23 nt, Artificial Sequence
  Synthetic
cauggaacgguuugccgcgcacg

SEQ ID NO: 11122 - RNA, 24 nt, Artificial Sequence
  Synthetic
ucauggaacgguuugccgcgcacg

SEQ ID NO: 11123 - RNA, 18 nt, Artificial Sequence
  Synthetic
gggaccugguggcgcacg

SEQ ID NO: 11124 - RNA, 19 nt, Artificial Sequence
  Synthetic
cgggaccugguggcgcacg

SEQ ID NO: 11125 - RNA, 21 nt, Artificial Sequence
  Synthetic
accgggaccugguggcgcacg

SEQ ID NO: 11126 - RNA, 22 nt, Artificial Sequence
  Synthetic
uaccgggaccugguggcgcacg

SEQ ID NO: 11127 - RNA, 23 nt, Artificial Sequence
  Synthetic
guaccgggaccugguggcgcacg

SEQ ID NO: 11128 - RNA, 24 nt, Artificial Sequence
  Synthetic
uguaccgggaccugguggcgcacg

SEQ ID NO: 11129 - RNA, 18 nt, Artificial Sequence
  Synthetic
ucgacggggcguugcacg

SEQ ID NO: 11130 - RNA, 19 nt, Artificial Sequence
  Synthetic
uucgacggggcguugcacg

SEQ ID NO: 11131 - RNA, 21 nt, Artificial Sequence
  Synthetic
uauucgacggggcguugcacg

SEQ ID NO: 11132 - RNA, 22 nt, Artificial Sequence
  Synthetic
auauucgacggggcguugcacg

SEQ ID NO: 11133 - RNA, 23 nt, Artificial Sequence
  Synthetic
cauauucgacggggcguugcacg

SEQ ID NO: 11134 - RNA, 24 nt, Artificial Sequence
  Synthetic
gcauauucgacggggcguugcacg

SEQ ID NO: 11135 - RNA, 18 nt, Artificial Sequence
  Synthetic
gaccugaaccggcagacg

SEQ ID NO: 11136 - RNA, 19 nt, Artificial Sequence
  Synthetic
cgaccugaaccggcagacg

SEQ ID NO: 11137 - RNA, 21 nt, Artificial Sequence
  Synthetic
cucgaccugaaccggcagacg

SEQ ID NO: 11138 - RNA, 22 nt, Artificial Sequence
  Synthetic
gcucgaccugaaccggcagacg

SEQ ID NO: 11139 - RNA, 23 nt, Artificial Sequence
  Synthetic
agcucgaccugaaccggcagacg

SEQ ID NO: 11140 - RNA, 24 nt, Artificial Sequence
  Synthetic
cagcucgaccugaaccggcagacg

SEQ ID NO: 11141 - RNA, 18 nt, Artificial Sequence
  Synthetic
uuguggggguggccgacg

SEQ ID NO: 11142 - RNA, 19 nt, Artificial Sequence
  Synthetic
uuuguggggguggccgacg

SEQ ID NO: 11143 - RNA, 21 nt, Artificial Sequence
  Synthetic
ucuuuguggggguggccgacg

SEQ ID NO: 11144 - RNA, 22 nt, Artificial Sequence
  Synthetic
uucuuuguggggguggccgacg

SEQ ID NO: 11145 - RNA, 23 nt, Artificial Sequence
  Synthetic
cuucuuuguggggguggccgacg

SEQ ID NO: 11146 - RNA, 24 nt, Artificial Sequence
  Synthetic
acuucuuuguggggguggccgacg

SEQ ID NO: 11147 - RNA, 18 nt, Artificial Sequence
  Synthetic
acgugccggugacguacg

SEQ ID NO: 11148 - RNA, 19 nt, Artificial Sequence
  Synthetic
gacgugccggugacguacg

SEQ ID NO: 11149 - RNA, 21 nt, Artificial Sequence
  Synthetic
ccgacgugccggugacguacg

SEQ ID NO: 11150 - RNA, 22 nt, Artificial Sequence
  Synthetic
gccgacgugccggugacguacg

SEQ ID NO: 11151 - RNA, 23 nt, Artificial Sequence
  Synthetic
agccgacgugccggugacguacg

SEQ ID NO: 11152 - RNA, 24 nt, Artificial Sequence
  Synthetic
aagccgacgugccggugacguacg

SEQ ID NO: 11153 - RNA, 18 nt, Artificial Sequence
  Synthetic
ccgccgggggcguuuacg

SEQ ID NO: 11154 - RNA, 19 nt, Artificial Sequence
  Synthetic
gccgccgggggcguuuacg

SEQ ID NO: 11155 - RNA, 21 nt, Artificial Sequence
  Synthetic
gcgccgccgggggcguuuacg

SEQ ID NO: 11156 - RNA, 22 nt, Artificial Sequence
  Synthetic
cgcgccgccgggggcguuuacg

SEQ ID NO: 11157 - RNA, 23 nt, Artificial Sequence
  Synthetic
acgcgccgccgggggcguuuacg

SEQ ID NO: 11158 - RNA, 24 nt, Artificial Sequence
  Synthetic
gacgcgccgccgggggcguuuacg

SEQ ID NO: 11159 - RNA, 18 nt, Artificial Sequence
  Synthetic
gggcaaggcgggccaccg

SEQ ID NO: 11160 - RNA, 19 nt, Artificial Sequence
  Synthetic
ugggcaaggcgggccaccg

SEQ ID NO: 11161 - RNA, 21 nt, Artificial Sequence
  Synthetic
ccugggcaaggcgggccaccg

SEQ ID NO: 11162 - RNA, 22 nt, Artificial Sequence
  Synthetic
uccugggcaaggcgggccaccg

SEQ ID NO: 11163 - RNA, 23 nt, Artificial Sequence
  Synthetic
uuccugggcaaggcgggccaccg

SEQ ID NO: 11164 - RNA, 24 nt, Artificial Sequence
  Synthetic
uuuccugggcaaggcgggccaccg

SEQ ID NO: 11165 - RNA, 18 nt, Artificial Sequence
  Synthetic
ggaugaccggccgcaccg

SEQ ID NO: 11166 - RNA, 19 nt, Artificial Sequence
  Synthetic
cggaugaccggccgcaccg

SEQ ID NO: 11167 - RNA, 21 nt, Artificial Sequence
  Synthetic
cgcggaugaccggccgcaccg

SEQ ID NO: 11168 - RNA, 22 nt, Artificial Sequence
  Synthetic
ccgcggaugaccggccgcaccg

SEQ ID NO: 11169 - RNA, 23 nt, Artificial Sequence
  Synthetic
gccgcggaugaccggccgcaccg

SEQ ID NO: 11170 - RNA, 24 nt, Artificial Sequence
  Synthetic
cgccgcggaugaccggccgcaccg

SEQ ID NO: 11171 - RNA, 18 nt, Artificial Sequence
  Synthetic
ggggccgcugcugcaccg

SEQ ID NO: 11172 - RNA, 19 nt, Artificial Sequence
  Synthetic
cggggccgcugcugcaccg

SEQ ID NO: 11173 - RNA, 21 nt, Artificial Sequence
  Synthetic
cgcggggccgcugcugcaccg

SEQ ID NO: 11174 - RNA, 22 nt, Artificial Sequence
  Synthetic
ucgcggggccgcugcugcaccg

SEQ ID NO: 11175 - RNA, 23 nt, Artificial Sequence
  Synthetic
cucgcggggccgcugcugcaccg

SEQ ID NO: 11176 - RNA, 24 nt, Artificial Sequence
  Synthetic
ucucgcggggccgcugcugcaccg

SEQ ID NO: 11177 - RNA, 18 nt, Artificial Sequence
  Synthetic
gccuuaaccgcgaccccg

SEQ ID NO: 11178 - RNA, 19 nt, Artificial Sequence
  Synthetic
ggccuuaaccgcgaccccg

SEQ ID NO: 11179 - RNA, 21 nt, Artificial Sequence
  Synthetic
ggggccuuaaccgcgaccccg

SEQ ID NO: 11180 - RNA, 22 nt, Artificial Sequence
  Synthetic
gggggccuuaaccgcgaccccg

SEQ ID NO: 11181 - RNA, 23 nt, Artificial Sequence
  Synthetic
cgggggccuuaaccgcgaccccg

SEQ ID NO: 11182 - RNA, 24 nt, Artificial Sequence
  Synthetic
ucgggggccuuaaccgcgaccccg

SEQ ID NO: 11183 - RNA, 18 nt, Artificial Sequence
  Synthetic
ucccggagaucgcccccg

SEQ ID NO: 11184 - RNA, 19 nt, Artificial Sequence
  Synthetic
gucccggagaucgcccccg

SEQ ID NO: 11185 - RNA, 21 nt, Artificial Sequence
  Synthetic
uggucccggagaucgcccccg

SEQ ID NO: 11186 - RNA, 22 nt, Artificial Sequence
  Synthetic
guggucccggagaucgcccccg

SEQ ID NO: 11187 - RNA, 23 nt, Artificial Sequence
  Synthetic
gguggucccggagaucgcccccg

SEQ ID NO: 11188 - RNA, 24 nt, Artificial Sequence
  Synthetic
ugguggucccggagaucgcccccg

SEQ ID NO: 11189 - RNA, 18 nt, Artificial Sequence
  Synthetic
guucccccggccggcccg

SEQ ID NO: 11190 - RNA, 19 nt, Artificial Sequence
  Synthetic
cguucccccggccggcccg

SEQ ID NO: 11191 - RNA, 21 nt, Artificial Sequence
  Synthetic
gacguucccccggccggcccg

SEQ ID NO: 11192 - RNA, 22 nt, Artificial Sequence
  Synthetic
ggacguucccccggccggcccg

SEQ ID NO: 11193 - RNA, 23 nt, Artificial Sequence
  Synthetic
gggacguucccccggccggcccg

SEQ ID NO: 11194 - RNA, 24 nt, Artificial Sequence
  Synthetic
ggggacguucccccggccggcccg

SEQ ID NO: 11195 - RNA, 18 nt, Artificial Sequence
  Synthetic
acccccggggacgcgccg

SEQ ID NO: 11196 - RNA, 19 nt, Artificial Sequence
  Synthetic
aacccccggggacgcgccg

SEQ ID NO: 11197 - RNA, 21 nt, Artificial Sequence
  Synthetic
gcaacccccggggacgcgccg

SEQ ID NO: 11198 - RNA, 22 nt, Artificial Sequence
  Synthetic
ugcaacccccggggacgcgccg

SEQ ID NO: 11199 - RNA, 23 nt, Artificial Sequence
  Synthetic
cugcaacccccggggacgcgccg

SEQ ID NO: 11200 - RNA, 24 nt, Artificial Sequence
  Synthetic
ccugcaacccccggggacgcgccg

SEQ ID NO: 11201 - RNA, 18 nt, Artificial Sequence
  Synthetic
gccaccgccgggaggccg

SEQ ID NO: 11202 - RNA, 19 nt, Artificial Sequence
  Synthetic
ggccaccgccgggaggccg

SEQ ID NO: 11203 - RNA, 21 nt, Artificial Sequence
  Synthetic
cgggccaccgccgggaggccg

SEQ ID NO: 11204 - RNA, 22 nt, Artificial Sequence
  Synthetic
gcgggccaccgccgggaggccg

SEQ ID NO: 11205 - RNA, 23 nt, Artificial Sequence
  Synthetic
ggcgggccaccgccgggaggccg

SEQ ID NO: 11206 - RNA, 24 nt, Artificial Sequence
  Synthetic
aggcgggccaccgccgggaggccg

SEQ ID NO: 11207 - RNA, 18 nt, Artificial Sequence
  Synthetic
uccgcgagagcgcggccg

SEQ ID NO: 11208 - RNA, 19 nt, Artificial Sequence
  Synthetic
guccgcgagagcgcggccg

SEQ ID NO: 11209 - RNA, 21 nt, Artificial Sequence
  Synthetic
acguccgcgagagcgcggccg

SEQ ID NO: 11210 - RNA, 22 nt, Artificial Sequence
  Synthetic
cacguccgcgagagcgcggccg

SEQ ID NO: 11211 - RNA, 23 nt, Artificial Sequence
  Synthetic
gcacguccgcgagagcgcggccg

SEQ ID NO: 11212 - RNA, 24 nt, Artificial Sequence
  Synthetic
agcacguccgcgagagcgcggccg

SEQ ID NO: 11213 - RNA, 18 nt, Artificial Sequence
  Synthetic
aaacuuuuaccugggccg

SEQ ID NO: 11214 - RNA, 19 nt, Artificial Sequence
  Synthetic
aaaacuuuuaccugggccg

SEQ ID NO: 11215 - RNA, 21 nt, Artificial Sequence
  Synthetic
ccaaaacuuuuaccugggccg

SEQ ID NO: 11216 - RNA, 22 nt, Artificial Sequence
  Synthetic
cccaaaacuuuuaccugggccg

SEQ ID NO: 11217 - RNA, 23 nt, Artificial Sequence
  Synthetic
ccccaaaacuuuuaccugggccg

SEQ ID NO: 11218 - RNA, 24 nt, Artificial Sequence
  Synthetic
uccccaaaacuuuuaccugggccg

SEQ ID NO: 11219 - RNA, 18 nt, Artificial Sequence
  Synthetic
gccgacguggagcugccg

SEQ ID NO: 11220 - RNA, 19 nt, Artificial Sequence
  Synthetic
ggccgacguggagcugccg

SEQ ID NO: 11221 - RNA, 21 nt, Artificial Sequence
  Synthetic
guggccgacguggagcugccg

SEQ ID NO: 11222 - RNA, 22 nt, Artificial Sequence
  Synthetic
gguggccgacguggagcugccg

SEQ ID NO: 11223 - RNA, 23 nt, Artificial Sequence
  Synthetic
ggguggccgacguggagcugccg

SEQ ID NO: 11224 - RNA, 24 nt, Artificial Sequence
  Synthetic
gggguggccgacguggagcugccg

SEQ ID NO: 11225 - RNA, 18 nt, Artificial Sequence
  Synthetic
gcgacugccggguuagcg

SEQ ID NO: 11226 - RNA, 19 nt, Artificial Sequence
  Synthetic
cgcgacugccggguuagcg

SEQ ID NO: 11227 - RNA, 21 nt, Artificial Sequence
  Synthetic
aucgcgacugccggguuagcg

SEQ ID NO: 11228 - RNA, 22 nt, Artificial Sequence
  Synthetic
caucgcgacugccggguuagcg

SEQ ID NO: 11229 - RNA, 23 nt, Artificial Sequence
  Synthetic
ccaucgcgacugccggguuagcg

SEQ ID NO: 11230 - RNA, 24 nt, Artificial Sequence
  Synthetic
gccaucgcgacugccggguuagcg

SEQ ID NO: 11231 - RNA, 18 nt, Artificial Sequence
  Synthetic
aacggggaagcccacgcg

SEQ ID NO: 11232 - RNA, 19 nt, Artificial Sequence
  Synthetic
caacggggaagcccacgcg

SEQ ID NO: 11233 - RNA, 21 nt, Artificial Sequence
  Synthetic
cgcaacggggaagcccacgcg

SEQ ID NO: 11234 - RNA, 22 nt, Artificial Sequence
  Synthetic
ccgcaacggggaagcccacgcg

SEQ ID NO: 11235 - RNA, 23 nt, Artificial Sequence
  Synthetic
cccgcaacggggaagcccacgcg

SEQ ID NO: 11236 - RNA, 24 nt, Artificial Sequence
  Synthetic
gcccgcaacggggaagcccacgcg

SEQ ID NO: 11237 - RNA, 18 nt, Artificial Sequence
  Synthetic
gccgggggcguuuacgcg

SEQ ID NO: 11238 - RNA, 19 nt, Artificial Sequence
  Synthetic
cgccgggggcguuuacgcg

SEQ ID NO: 11239 - RNA, 21 nt, Artificial Sequence
  Synthetic
gccgccgggggcguuuacgcg

SEQ ID NO: 11240 - RNA, 22 nt, Artificial Sequence
  Synthetic
cgccgccgggggcguuuacgcg

SEQ ID NO: 11241 - RNA, 23 nt, Artificial Sequence
  Synthetic
gcgccgccgggggcguuuacgcg

SEQ ID NO: 11242 - RNA, 24 nt, Artificial Sequence
  Synthetic
cgcgccgccgggggcguuuacgcg

SEQ ID NO: 11243 - RNA, 18 nt, Artificial Sequence
  Synthetic
gacugccggguuagcgcg

SEQ ID NO: 11244 - RNA, 19 nt, Artificial Sequence
  Synthetic
cgacugccggguuagcgcg

SEQ ID NO: 11245 - RNA, 21 nt, Artificial Sequence
  Synthetic
cgcgacugccggguuagcgcg

SEQ ID NO: 11246 - RNA, 22 nt, Artificial Sequence
  Synthetic
ucgcgacugccggguuagcgcg

SEQ ID NO: 11247 - RNA, 23 nt, Artificial Sequence
  Synthetic
aucgcgacugccggguuagcgcg

SEQ ID NO: 11248 - RNA, 24 nt, Artificial Sequence
  Synthetic
caucgcgacugccggguuagcgcg

SEQ ID NO: 11249 - RNA, 18 nt, Artificial Sequence
  Synthetic
cuguucucggagcgcgcg

SEQ ID NO: 11250 - RNA, 19 nt, Artificial Sequence
  Synthetic
gcuguucucggagcgcgcg

SEQ ID NO: 11251 - RNA, 21 nt, Artificial Sequence
  Synthetic
gugcuguucucggagcgcgcg

SEQ ID NO: 11252 - RNA, 22 nt, Artificial Sequence
  Synthetic
cgugcuguucucggagcgcgcg

SEQ ID NO: 11253 - RNA, 23 nt, Artificial Sequence
  Synthetic
acgugcuguucucggagcgcgcg

SEQ ID NO: 11254 - RNA, 24 nt, Artificial Sequence
  Synthetic
aacgugcuguucucggagcgcgcg

SEQ ID NO: 11255 - RNA, 18 nt, Artificial Sequence
  Synthetic
cccaggugccgcggcgcg

SEQ ID NO: 11256 - RNA, 19 nt, Artificial Sequence
  Synthetic
gcccaggugccgcggcgcg

SEQ ID NO: 11257 - RNA, 21 nt, Artificial Sequence
  Synthetic
gcgcccaggugccgcggcgcg

SEQ ID NO: 11258 - RNA, 22 nt, Artificial Sequence
  Synthetic
ugcgcccaggugccgcggcgcg

SEQ ID NO: 11259 - RNA, 23 nt, Artificial Sequence
  Synthetic
gugcgcccaggugccgcggcgcg

SEQ ID NO: 11260 - RNA, 24 nt, Artificial Sequence
  Synthetic
ggugcgcccaggugccgcggcgcg

SEQ ID NO: 11261 - RNA, 18 nt, Artificial Sequence
  Synthetic
cccggcacgaaacuggcg

SEQ ID NO: 11262 - RNA, 19 nt, Artificial Sequence
  Synthetic
gcccggcacgaaacuggcg

SEQ ID NO: 11263 - RNA, 21 nt, Artificial Sequence
  Synthetic
uggcccggcacgaaacuggcg

SEQ ID NO: 11264 - RNA, 22 nt, Artificial Sequence
  Synthetic
guggcccggcacgaaacuggcg

SEQ ID NO: 11265 - RNA, 23 nt, Artificial Sequence
  Synthetic
gguggcccggcacgaaacuggcg

SEQ ID NO: 11266 - RNA, 24 nt, Artificial Sequence
  Synthetic
agguggcccggcacgaaacuggcg

SEQ ID NO: 11267 - RNA, 18 nt, Artificial Sequence
  Synthetic
cggaucugguguccaucg

SEQ ID NO: 11268 - RNA, 19 nt, Artificial Sequence
  Synthetic
gcggaucugguguccaucg

SEQ ID NO: 11269 - RNA, 21 nt, Artificial Sequence
  Synthetic
gcgcggaucugguguccaucg

SEQ ID NO: 11270 - RNA, 22 nt, Artificial Sequence
  Synthetic
cgcgcggaucugguguccaucg

SEQ ID NO: 11271 - RNA, 23 nt, Artificial Sequence
  Synthetic
gcgcgcggaucugguguccaucg

SEQ ID NO: 11272 - RNA, 24 nt, Artificial Sequence
  Synthetic
ugcgcgcggaucugguguccaucg

SEQ ID NO: 11273 - RNA, 18 nt, Artificial Sequence
  Synthetic
gccuggagcgccugaucg

SEQ ID NO: 11274 - RNA, 19 nt, Artificial Sequence
  Synthetic
ugccuggagcgccugaucg

SEQ ID NO: 11275 - RNA, 21 nt, Artificial Sequence
  Synthetic
gcugccuggagcgccugaucg

SEQ ID NO: 11276 - RNA, 22 nt, Artificial Sequence
  Synthetic
cgcugccuggagcgccugaucg

SEQ ID NO: 11277 - RNA, 23 nt, Artificial Sequence
  Synthetic
ucgcugccuggagcgccugaucg

SEQ ID NO: 11278 - RNA, 24 nt, Artificial Sequence
  Synthetic
aucgcugccuggagcgccugaucg

SEQ ID NO: 11279 - RNA, 18 nt, Artificial Sequence
  Synthetic
cggggugccgcgaacucg

SEQ ID NO: 11280 - RNA, 19 nt, Artificial Sequence
  Synthetic
ccggggugccgcgaacucg

SEQ ID NO: 11281 - RNA, 21 nt, Artificial Sequence
  Synthetic
ccccggggugccgcgaacucg

SEQ ID NO: 11282 - RNA, 22 nt, Artificial Sequence
  Synthetic
cccccggggugccgcgaacucg

SEQ ID NO: 11283 - RNA, 23 nt, Artificial Sequence
  Synthetic
ccccccggggugccgcgaacucg

SEQ ID NO: 11284 - RNA, 24 nt, Artificial Sequence
  Synthetic
gccccccggggugccgcgaacucg

SEQ ID NO: 11285 - RNA, 18 nt, Artificial Sequence
  Synthetic
acgucgugaccuaccucg

SEQ ID NO: 11286 - RNA, 19 nt, Artificial Sequence
  Synthetic
uacgucgugaccuaccucg

SEQ ID NO: 11287 - RNA, 21 nt, Artificial Sequence
  Synthetic
cguacgucgugaccuaccucg

SEQ ID NO: 11288 - RNA, 22 nt, Artificial Sequence
  Synthetic
ucguacgucgugaccuaccucg

SEQ ID NO: 11289 - RNA, 23 nt, Artificial Sequence
  Synthetic
cucguacgucgugaccuaccucg

SEQ ID NO: 11290 - RNA, 24 nt, Artificial Sequence
  Synthetic
ucucguacgucgugaccuaccucg

SEQ ID NO: 11291 - RNA, 18 nt, Artificial Sequence
  Synthetic
auggugcccgccuucucg

SEQ ID NO: 11292 - RNA, 19 nt, Artificial Sequence
  Synthetic
gauggugcccgccuucucg

SEQ ID NO: 11293 - RNA, 21 nt, Artificial Sequence
  Synthetic
gugauggugcccgccuucucg

SEQ ID NO: 11294 - RNA, 22 nt, Artificial Sequence
  Synthetic
cgugauggugcccgccuucucg

SEQ ID NO: 11295 - RNA, 23 nt, Artificial Sequence
  Synthetic
acgugauggugcccgccuucucg

SEQ ID NO: 11296 - RNA, 24 nt, Artificial Sequence
  Synthetic
uacgugauggugcccgccuucucg

SEQ ID NO: 11297 - RNA, 18 nt, Artificial Sequence
  Synthetic
cgcgcgggcggccggucg

SEQ ID NO: 11298 - RNA, 19 nt, Artificial Sequence
  Synthetic
acgcgcgggcggccggucg

SEQ ID NO: 11299 - RNA, 21 nt, Artificial Sequence
  Synthetic
acacgcgcgggcggccggucg

SEQ ID NO: 11300 - RNA, 22 nt, Artificial Sequence
  Synthetic
gacacgcgcgggcggccggucg

SEQ ID NO: 11301 - RNA, 23 nt, Artificial Sequence
  Synthetic
cgacacgcgcgggcggccggucg

SEQ ID NO: 11302 - RNA, 24 nt, Artificial Sequence
  Synthetic
ccgacacgcgcgggcggccggucg

SEQ ID NO: 11303 - RNA, 18 nt, Artificial Sequence
  Synthetic
ggcggguccgaugggucg

SEQ ID NO: 11304 - RNA, 19 nt, Artificial Sequence
  Synthetic
gggcggguccgaugggucg

SEQ ID NO: 11305 - RNA, 21 nt, Artificial Sequence
  Synthetic
acgggcggguccgaugggucg

SEQ ID NO: 11306 - RNA, 22 nt, Artificial Sequence
  Synthetic
cacgggcggguccgaugggucg

SEQ ID NO: 11307 - RNA, 23 nt, Artificial Sequence
  Synthetic
ccacgggcggguccgaugggucg

SEQ ID NO: 11308 - RNA, 24 nt, Artificial Sequence
  Synthetic
cccacgggcggguccgaugggucg

SEQ ID NO: 11309 - RNA, 18 nt, Artificial Sequence
  Synthetic
cccgggcgacccuggucg

SEQ ID NO: 11310 - RNA, 19 nt, Artificial Sequence
  Synthetic
gcccgggcgacccuggucg

SEQ ID NO: 11311 - RNA, 21 nt, Artificial Sequence
  Synthetic
uggcccgggcgacccuggucg

SEQ ID NO: 11312 - RNA, 22 nt, Artificial Sequence
  Synthetic
guggcccgggcgacccuggucg

SEQ ID NO: 11313 - RNA, 23 nt, Artificial Sequence
  Synthetic
gguggcccgggcgacccuggucg

SEQ ID NO: 11314 - RNA, 24 nt, Artificial Sequence
  Synthetic
ggguggcccgggcgacccuggucg

SEQ ID NO: 11315 - RNA, 18 nt, Artificial Sequence
  Synthetic
ccaacaugcgcauauucg

SEQ ID NO: 11316 - RNA, 19 nt, Artificial Sequence
  Synthetic
accaacaugcgcauauucg

SEQ ID NO: 11317 - RNA, 21 nt, Artificial Sequence
  Synthetic
ccaccaacaugcgcauauucg

SEQ ID NO: 11318 - RNA, 22 nt, Artificial Sequence
  Synthetic
accaccaacaugcgcauauucg

SEQ ID NO: 11319 - RNA, 23 nt, Artificial Sequence
  Synthetic
caccaccaacaugcgcauauucg

SEQ ID NO: 11320 - RNA, 24 nt, Artificial Sequence
  Synthetic
ccaccaccaacaugcgcauauucg

SEQ ID NO: 11321 - RNA, 18 nt, Artificial Sequence
  Synthetic
caccaucgccgccguucg

SEQ ID NO: 11322 - RNA, 19 nt, Artificial Sequence
  Synthetic
ccaccaucgccgccguucg

SEQ ID NO: 11323 - RNA, 21 nt, Artificial Sequence
  Synthetic
cgccaccaucgccgccguucg

SEQ ID NO: 11324 - RNA, 22 nt, Artificial Sequence
  Synthetic
ccgccaccaucgccgccguucg

SEQ ID NO: 11325 - RNA, 23 nt, Artificial Sequence
  Synthetic
cccgccaccaucgccgccguucg

SEQ ID NO: 11326 - RNA, 24 nt, Artificial Sequence
  Synthetic
ccccgccaccaucgccgccguucg

SEQ ID NO: 11327 - RNA, 18 nt, Artificial Sequence
  Synthetic
ccguccacgcgcuguucg

SEQ ID NO: 11328 - RNA, 19 nt, Artificial Sequence
  Synthetic
cccguccacgcgcuguucg

SEQ ID NO: 11329 - RNA, 21 nt, Artificial Sequence
  Synthetic
uccccguccacgcgcuguucg

SEQ ID NO: 11330 - RNA, 22 nt, Artificial Sequence
  Synthetic
cuccccguccacgcgcuguucg

SEQ ID NO: 11331 - RNA, 23 nt, Artificial Sequence
  Synthetic
ccuccccguccacgcgcuguucg

SEQ ID NO: 11332 - RNA, 24 nt, Artificial Sequence
  Synthetic
cccuccccguccacgcgcuguucg

SEQ ID NO: 11333 - RNA, 18 nt, Artificial Sequence
  Synthetic
uuuacgcgggggacaagg

SEQ ID NO: 11334 - RNA, 19 nt, Artificial Sequence
  Synthetic
guuuacgcgggggacaagg

SEQ ID NO: 11335 - RNA, 21 nt, Artificial Sequence
  Synthetic
gcguuuacgcgggggacaagg

SEQ ID NO: 11336 - RNA, 22 nt, Artificial Sequence
  Synthetic
ggcguuuacgcgggggacaagg

SEQ ID NO: 11337 - RNA, 23 nt, Artificial Sequence
  Synthetic
gggcguuuacgcgggggacaagg

SEQ ID NO: 11338 - RNA, 24 nt, Artificial Sequence
  Synthetic
ggggcguuuacgcgggggacaagg

SEQ ID NO: 11339 - RNA, 18 nt, Artificial Sequence
  Synthetic
accugcuggagaugcagg

SEQ ID NO: 11340 - RNA, 19 nt, Artificial Sequence
  Synthetic
caccugcuggagaugcagg

SEQ ID NO: 11341 - RNA, 21 nt, Artificial Sequence
  Synthetic
gccaccugcuggagaugcagg

SEQ ID NO: 11342 - RNA, 22 nt, Artificial Sequence
  Synthetic
cgccaccugcuggagaugcagg

SEQ ID NO: 11343 - RNA, 23 nt, Artificial Sequence
  Synthetic
ccgccaccugcuggagaugcagg

SEQ ID NO: 11344 - RNA, 24 nt, Artificial Sequence
  Synthetic
gccgccaccugcuggagaugcagg

SEQ ID NO: 11345 - RNA, 18 nt, Artificial Sequence
  Synthetic
uucccccggccggcccgg

SEQ ID NO: 11346 - RNA, 19 nt, Artificial Sequence
  Synthetic
guucccccggccggcccgg

SEQ ID NO: 11347 - RNA, 21 nt, Artificial Sequence
  Synthetic
acguucccccggccggcccgg

SEQ ID NO: 11348 - RNA, 22 nt, Artificial Sequence
  Synthetic
gacguucccccggccggcccgg

SEQ ID NO: 11349 - RNA, 23 nt, Artificial Sequence
  Synthetic
ggacguucccccggccggcccgg

SEQ ID NO: 11350 - RNA, 24 nt, Artificial Sequence
  Synthetic
gggacguucccccggccggcccgg

SEQ ID NO: 11351 - RNA, 18 nt, Artificial Sequence
  Synthetic
ccgacguggagcugccgg

SEQ ID NO: 11352 - RNA, 19 nt, Artificial Sequence
  Synthetic
gccgacguggagcugccgg

SEQ ID NO: 11353 - RNA, 21 nt, Artificial Sequence
  Synthetic
uggccgacguggagcugccgg

SEQ ID NO: 11354 - RNA, 22 nt, Artificial Sequence
  Synthetic
guggccgacguggagcugccgg

SEQ ID NO: 11355 - RNA, 23 nt, Artificial Sequence
  Synthetic
gguggccgacguggagcugccgg

SEQ ID NO: 11356 - RNA, 24 nt, Artificial Sequence
  Synthetic
ggguggccgacguggagcugccgg

SEQ ID NO: 11357 - RNA, 18 nt, Artificial Sequence
  Synthetic
acguccgcgagagcgcgg

SEQ ID NO: 11358 - RNA, 19 nt, Artificial Sequence
  Synthetic
cacguccgcgagagcgcgg

SEQ ID NO: 11359 - RNA, 21 nt, Artificial Sequence
  Synthetic
agcacguccgcgagagcgcgg

SEQ ID NO: 11360 - RNA, 22 nt, Artificial Sequence
  Synthetic
cagcacguccgcgagagcgcgg

SEQ ID NO: 11361 - RNA, 23 nt, Artificial Sequence
  Synthetic
gcagcacguccgcgagagcgcgg

SEQ ID NO: 11362 - RNA, 24 nt, Artificial Sequence
  Synthetic
ugcagcacguccgcgagagcgcgg

SEQ ID NO: 11363 - RNA, 18 nt, Artificial Sequence
  Synthetic
ugaacguugacgcggcgg

SEQ ID NO: 11364 - RNA, 19 nt, Artificial Sequence
  Synthetic
augaacguugacgcggcgg

SEQ ID NO: 11365 - RNA, 21 nt, Artificial Sequence
  Synthetic
ugaugaacguugacgcggcgg

SEQ ID NO: 11366 - RNA, 22 nt, Artificial Sequence
  Synthetic
cugaugaacguugacgcggcgg

SEQ ID NO: 11367 - RNA, 23 nt, Artificial Sequence
  Synthetic
gcugaugaacguugacgcggcgg

SEQ ID NO: 11368 - RNA, 24 nt, Artificial Sequence
  Synthetic
cgcugaugaacguugacgcggcgg

SEQ ID NO: 11369 - RNA, 18 nt, Artificial Sequence
  Synthetic
cgucgugaccuaccucgg

SEQ ID NO: 11370 - RNA, 19 nt, Artificial Sequence
  Synthetic
acgucgugaccuaccucgg

SEQ ID NO: 11371 - RNA, 21 nt, Artificial Sequence
  Synthetic
guacgucgugaccuaccucgg

SEQ ID NO: 11372 - RNA, 22 nt, Artificial Sequence
  Synthetic
cguacgucgugaccuaccucgg

SEQ ID NO: 11373 - RNA, 23 nt, Artificial Sequence
  Synthetic
ucguacgucgugaccuaccucgg

SEQ ID NO: 11374 - RNA, 24 nt, Artificial Sequence
  Synthetic
cucguacgucgugaccuaccucgg

SEQ ID NO: 11375 - RNA, 18 nt, Artificial Sequence
  Synthetic
gugccgcggcgcgcaggg

SEQ ID NO: 11376 - RNA, 19 nt, Artificial Sequence
  Synthetic
ggugccgcggcgcgcaggg

SEQ ID NO: 11377 - RNA, 21 nt, Artificial Sequence
  Synthetic
caggugccgcggcgcgcaggg

SEQ ID NO: 11378 - RNA, 22 nt, Artificial Sequence
  Synthetic
ccaggugccgcggcgcgcaggg

SEQ ID NO: 11379 - RNA, 23 nt, Artificial Sequence
  Synthetic
cccaggugccgcggcgcgcaggg

SEQ ID NO: 11380 - RNA, 24 nt, Artificial Sequence
  Synthetic
gcccaggugccgcggcgcgcaggg

SEQ ID NO: 11381 - RNA, 18 nt, Artificial Sequence
  Synthetic
cgcgagagcgcggccggg

SEQ ID NO: 11382 - RNA, 19 nt, Artificial Sequence
  Synthetic
ccgcgagagcgcggccggg

SEQ ID NO: 11383 - RNA, 21 nt, Artificial Sequence
  Synthetic
guccgcgagagcgcggccggg

SEQ ID NO: 11384 - RNA, 22 nt, Artificial Sequence
  Synthetic
cguccgcgagagcgcggccggg

SEQ ID NO: 11385 - RNA, 23 nt, Artificial Sequence
  Synthetic
acguccgcgagagcgcggccggg

SEQ ID NO: 11386 - RNA, 24 nt, Artificial Sequence
  Synthetic
cacguccgcgagagcgcggccggg

SEQ ID NO: 11387 - RNA, 18 nt, Artificial Sequence
  Synthetic
cgacguggagcugccggg

SEQ ID NO: 11388 - RNA, 19 nt, Artificial Sequence
  Synthetic
ccgacguggagcugccggg

SEQ ID NO: 11389 - RNA, 21 nt, Artificial Sequence
  Synthetic
ggccgacguggagcugccggg

SEQ ID NO: 11390 - RNA, 22 nt, Artificial Sequence
  Synthetic
uggccgacguggagcugccggg

SEQ ID NO: 11391 - RNA, 23 nt, Artificial Sequence
  Synthetic
guggccgacguggagcugccggg

SEQ ID NO: 11392 - RNA, 24 nt, Artificial Sequence
  Synthetic
gguggccgacguggagcugccggg

SEQ ID NO: 11393 - RNA, 18 nt, Artificial Sequence
  Synthetic
gacguggagcugccgggg

SEQ ID NO: 11394 - RNA, 19 nt, Artificial Sequence
  Synthetic
cgacguggagcugccgggg

SEQ ID NO: 11395 - RNA, 21 nt, Artificial Sequence
  Synthetic
gccgacguggagcugccgggg

SEQ ID NO: 11396 - RNA, 22 nt, Artificial Sequence
  Synthetic
ggccgacguggagcugccgggg

SEQ ID NO: 11397 - RNA, 23 nt, Artificial Sequence
  Synthetic
uggccgacguggagcugccgggg

SEQ ID NO: 11398 - RNA, 24 nt, Artificial Sequence
  Synthetic
guggccgacguggagcugccgggg

SEQ ID NO: 11399 - RNA, 18 nt, Artificial Sequence
  Synthetic
gaccggccgcaccggggg

SEQ ID NO: 11400 - RNA, 19 nt, Artificial Sequence
  Synthetic
ugaccggccgcaccggggg

SEQ ID NO: 11401 - RNA, 21 nt, Artificial Sequence
  Synthetic
gaugaccggccgcaccggggg

SEQ ID NO: 11402 - RNA, 22 nt, Artificial Sequence
  Synthetic
ggaugaccggccgcaccggggg

SEQ ID NO: 11403 - RNA, 23 nt, Artificial Sequence
  Synthetic
cggaugaccggccgcaccggggg

SEQ ID NO: 11404 - RNA, 24 nt, Artificial Sequence
  Synthetic
gcggaugaccggccgcaccggggg

SEQ ID NO: 11405 - RNA, 18 nt, Artificial Sequence
  Synthetic
ggggccuggagcuggggg

SEQ ID NO: 11406 - RNA, 19 nt, Artificial Sequence
  Synthetic
cggggccuggagcuggggg

SEQ ID NO: 11407 - RNA, 21 nt, Artificial Sequence
  Synthetic
cccggggccuggagcuggggg

SEQ ID NO: 11408 - RNA, 22 nt, Artificial Sequence
  Synthetic
gcccggggccuggagcuggggg

SEQ ID NO: 11409 - RNA, 23 nt, Artificial Sequence
  Synthetic
cgcccggggccuggagcuggggg

SEQ ID NO: 11410 - RNA, 24 nt, Artificial Sequence
  Synthetic
acgcccggggccuggagcuggggg

SEQ ID NO: 11411 - RNA, 18 nt, Artificial Sequence
  Synthetic
cagcuguuuuuuuggggg

SEQ ID NO: 11412 - RNA, 19 nt, Artificial Sequence
  Synthetic
ccagcuguuuuuuuggggg

SEQ ID NO: 11413 - RNA, 21 nt, Artificial Sequence
  Synthetic
cgccagcuguuuuuuuggggg

SEQ ID NO: 11414 - RNA, 22 nt, Artificial Sequence
  Synthetic
ccgccagcuguuuuuuuggggg

SEQ ID NO: 11415 - RNA, 23 nt, Artificial Sequence
  Synthetic
cccgccagcuguuuuuuuggggg

SEQ ID NO: 11416 - RNA, 24 nt, Artificial Sequence
  Synthetic
ccccgccagcuguuuuuuuggggg

SEQ ID NO: 11417 - RNA, 18 nt, Artificial Sequence
  Synthetic
cggggccuggagcugggg

SEQ ID NO: 11418 - RNA, 19 nt, Artificial Sequence
  Synthetic
ccggggccuggagcugggg

SEQ ID NO: 11419 - RNA, 21 nt, Artificial Sequence
  Synthetic
gcccggggccuggagcugggg

SEQ ID NO: 11420 - RNA, 22 nt, Artificial Sequence
  Synthetic
cgcccggggccuggagcugggg

SEQ ID NO: 11421 - RNA, 23 nt, Artificial Sequence
  Synthetic
acgcccggggccuggagcugggg

SEQ ID NO: 11422 - RNA, 24 nt, Artificial Sequence
  Synthetic
gacgcccggggccuggagcugggg

SEQ ID NO: 11423 - RNA, 18 nt, Artificial Sequence
  Synthetic
ugcuggcccacaacaugg

SEQ ID NO: 11424 - RNA, 19 nt, Artificial Sequence
  Synthetic
gugcuggcccacaacaugg

SEQ ID NO: 11425 - RNA, 21 nt, Artificial Sequence
  Synthetic
aggugcuggcccacaacaugg

SEQ ID NO: 11426 - RNA, 22 nt, Artificial Sequence
  Synthetic
caggugcuggcccacaacaugg

SEQ ID NO: 11427 - RNA, 23 nt, Artificial Sequence
  Synthetic
gcaggugcuggcccacaacaugg

SEQ ID NO: 11428 - RNA, 24 nt, Artificial Sequence
  Synthetic
ugcaggugcuggcccacaacaugg

SEQ ID NO: 11429 - RNA, 18 nt, Artificial Sequence
  Synthetic
ggcccggcacgaaacugg

SEQ ID NO: 11430 - RNA, 19 nt, Artificial Sequence
  Synthetic
uggcccggcacgaaacugg

SEQ ID NO: 11431 - RNA, 21 nt, Artificial Sequence
  Synthetic
gguggcccggcacgaaacugg

SEQ ID NO: 11432 - RNA, 22 nt, Artificial Sequence
  Synthetic
agguggcccggcacgaaacugg

SEQ ID NO: 11433 - RNA, 23 nt, Artificial Sequence
  Synthetic
cagguggcccggcacgaaacugg

SEQ ID NO: 11434 - RNA, 24 nt, Artificial Sequence
  Synthetic
ccagguggcccggcacgaaacugg

SEQ ID NO: 11435 - RNA, 18 nt, Artificial Sequence
  Synthetic
ugaccggcccggagcugg

SEQ ID NO: 11436 - RNA, 19 nt, Artificial Sequence
  Synthetic
cugaccggcccggagcugg

SEQ ID NO: 11437 - RNA, 21 nt, Artificial Sequence
  Synthetic
cccugaccggcccggagcugg

SEQ ID NO: 11438 - RNA, 22 nt, Artificial Sequence
  Synthetic
acccugaccggcccggagcugg

SEQ ID NO: 11439 - RNA, 23 nt, Artificial Sequence
  Synthetic
uacccugaccggcccggagcugg

SEQ ID NO: 11440 - RNA, 24 nt, Artificial Sequence
  Synthetic
uuacccugaccggcccggagcugg

SEQ ID NO: 11441 - RNA, 18 nt, Artificial Sequence
  Synthetic
ugaaccggcagacgcugg

SEQ ID NO: 11442 - RNA, 19 nt, Artificial Sequence
  Synthetic
cugaaccggcagacgcugg

SEQ ID NO: 11443 - RNA, 21 nt, Artificial Sequence
  Synthetic
accugaaccggcagacgcugg

SEQ ID NO: 11444 - RNA, 22 nt, Artificial Sequence
  Synthetic
gaccugaaccggcagacgcugg

SEQ ID NO: 11445 - RNA, 23 nt, Artificial Sequence
  Synthetic
cgaccugaaccggcagacgcugg

SEQ ID NO: 11446 - RNA, 24 nt, Artificial Sequence
  Synthetic
ucgaccugaaccggcagacgcugg

SEQ ID NO: 11447 - RNA, 18 nt, Artificial Sequence
  Synthetic
acgggcgcgugguagugg

SEQ ID NO: 11448 - RNA, 19 nt, Artificial Sequence
  Synthetic
aacgggcgcgugguagugg

SEQ ID NO: 11449 - RNA, 21 nt, Artificial Sequence
  Synthetic
acaacgggcgcgugguagugg

SEQ ID NO: 11450 - RNA, 22 nt, Artificial Sequence
  Synthetic
cacaacgggcgcgugguagugg

SEQ ID NO: 11451 - RNA, 23 nt, Artificial Sequence
  Synthetic
ucacaacgggcgcgugguagugg

SEQ ID NO: 11452 - RNA, 24 nt, Artificial Sequence
  Synthetic
uucacaacgggcgcgugguagugg

SEQ ID NO: 11453 - RNA, 18 nt, Artificial Sequence
  Synthetic
ugcggaacgcggucgugg

SEQ ID NO: 11454 - RNA, 19 nt, Artificial Sequence
  Synthetic
cugcggaacgcggucgugg

SEQ ID NO: 11455 - RNA, 21 nt, Artificial Sequence
  Synthetic
accugcggaacgcggucgugg

SEQ ID NO: 11456 - RNA, 22 nt, Artificial Sequence
  Synthetic
uaccugcggaacgcggucgugg

SEQ ID NO: 11457 - RNA, 23 nt, Artificial Sequence
  Synthetic
guaccugcggaacgcggucgugg

SEQ ID NO: 11458 - RNA, 24 nt, Artificial Sequence
  Synthetic
uguaccugcggaacgcggucgugg

SEQ ID NO: 11459 - RNA, 18 nt, Artificial Sequence
  Synthetic
cgccagcuguuuuuuugg

SEQ ID NO: 11460 - RNA, 19 nt, Artificial Sequence
  Synthetic
ccgccagcuguuuuuuugg

SEQ ID NO: 11461 - RNA, 21 nt, Artificial Sequence
  Synthetic
ccccgccagcuguuuuuuugg

SEQ ID NO: 11462 - RNA, 22 nt, Artificial Sequence
  Synthetic
gccccgccagcuguuuuuuugg

SEQ ID NO: 11463 - RNA, 23 nt, Artificial Sequence
  Synthetic
cgccccgccagcuguuuuuuugg

SEQ ID NO: 11464 - RNA, 24 nt, Artificial Sequence
  Synthetic
ccgccccgccagcuguuuuuuugg

SEQ ID NO: 11465 - RNA, 18 nt, Artificial Sequence
  Synthetic
cugaccuacgcgcucaug

SEQ ID NO: 11466 - RNA, 19 nt, Artificial Sequence
  Synthetic
gcugaccuacgcgcucaug

SEQ ID NO: 11467 - RNA, 21 nt, Artificial Sequence
  Synthetic
gcgcugaccuacgcgcucaug

SEQ ID NO: 11468 - RNA, 22 nt, Artificial Sequence
  Synthetic
cgcgcugaccuacgcgcucaug

SEQ ID NO: 11469 - RNA, 23 nt, Artificial Sequence
  Synthetic
acgcgcugaccuacgcgcucaug

SEQ ID NO: 11470 - RNA, 24 nt, Artificial Sequence
  Synthetic
aacgcgcugaccuacgcgcucaug

SEQ ID NO: 11471 - RNA, 18 nt, Artificial Sequence
  Synthetic
cgccaccugcuggagaug

SEQ ID NO: 11472 - RNA, 19 nt, Artificial Sequence
  Synthetic
ccgccaccugcuggagaug

SEQ ID NO: 11473 - RNA, 21 nt, Artificial Sequence
  Synthetic
ggccgccaccugcuggagaug

SEQ ID NO: 11474 - RNA, 22 nt, Artificial Sequence
  Synthetic
gggccgccaccugcuggagaug

SEQ ID NO: 11475 - RNA, 23 nt, Artificial Sequence
  Synthetic
ugggccgccaccugcuggagaug

SEQ ID NO: 11476 - RNA, 24 nt, Artificial Sequence
  Synthetic
gugggccgccaccugcuggagaug

SEQ ID NO: 11477 - RNA, 18 nt, Artificial Sequence
  Synthetic
uggcccggcacgaaacug

SEQ ID NO: 11478 - RNA, 19 nt, Artificial Sequence
  Synthetic
guggcccggcacgaaacug

SEQ ID NO: 11479 - RNA, 21 nt, Artificial Sequence
  Synthetic
agguggcccggcacgaaacug

SEQ ID NO: 11480 - RNA, 22 nt, Artificial Sequence
  Synthetic
cagguggcccggcacgaaacug

SEQ ID NO: 11481 - RNA, 23 nt, Artificial Sequence
  Synthetic
ccagguggcccggcacgaaacug

SEQ ID NO: 11482 - RNA, 24 nt, Artificial Sequence
  Synthetic
uccagguggcccggcacgaaacug

SEQ ID NO: 11483 - RNA, 18 nt, Artificial Sequence
  Synthetic
gacgugggccgccaccug

SEQ ID NO: 11484 - RNA, 19 nt, Artificial Sequence
  Synthetic
cgacgugggccgccaccug

SEQ ID NO: 11485 - RNA, 21 nt, Artificial Sequence
  Synthetic
gacgacgugggccgccaccug

SEQ ID NO: 11486 - RNA, 22 nt, Artificial Sequence
  Synthetic
ggacgacgugggccgccaccug

SEQ ID NO: 11487 - RNA, 23 nt, Artificial Sequence
  Synthetic
uggacgacgugggccgccaccug

SEQ ID NO: 11488 - RNA, 24 nt, Artificial Sequence
  Synthetic
cuggacgacgugggccgccaccug

SEQ ID NO: 11489 - RNA, 18 nt, Artificial Sequence
  Synthetic
gcggcagccguguaccug

SEQ ID NO: 11490 - RNA, 19 nt, Artificial Sequence
  Synthetic
cgcggcagccguguaccug

SEQ ID NO: 11491 - RNA, 21 nt, Artificial Sequence
  Synthetic
aacgcggcagccguguaccug

SEQ ID NO: 11492 - RNA, 22 nt, Artificial Sequence
  Synthetic
caacgcggcagccguguaccug

SEQ ID NO: 11493 - RNA, 23 nt, Artificial Sequence
  Synthetic
acaacgcggcagccguguaccug

SEQ ID NO: 11494 - RNA, 24 nt, Artificial Sequence
  Synthetic
gacaacgcggcagccguguaccug

SEQ ID NO: 11495 - RNA, 18 nt, Artificial Sequence
  Synthetic
cgcguauacgccacccug

SEQ ID NO: 11496 - RNA, 19 nt, Artificial Sequence
  Synthetic
ccgcguauacgccacccug

SEQ ID NO: 11497 - RNA, 21 nt, Artificial Sequence
  Synthetic
gaccgcguauacgccacccug

SEQ ID NO: 11498 - RNA, 22 nt, Artificial Sequence
  Synthetic
cgaccgcguauacgccacccug

SEQ ID NO: 11499 - RNA, 23 nt, Artificial Sequence
  Synthetic
ucgaccgcguauacgccacccug

SEQ ID NO: 11500 - RNA, 24 nt, Artificial Sequence
  Synthetic
uucgaccgcguauacgccacccug

SEQ ID NO: 11501 - RNA, 18 nt, Artificial Sequence
  Synthetic
aacguucccuacccccug

SEQ ID NO: 11502 - RNA, 19 nt, Artificial Sequence
  Synthetic
caacguucccuacccccug

SEQ ID NO: 11503 - RNA, 21 nt, Artificial Sequence
  Synthetic
accaacguucccuacccccug

SEQ ID NO: 11504 - RNA, 22 nt, Artificial Sequence
  Synthetic
caccaacguucccuacccccug

SEQ ID NO: 11505 - RNA, 23 nt, Artificial Sequence
  Synthetic
ccaccaacguucccuacccccug

SEQ ID NO: 11506 - RNA, 24 nt, Artificial Sequence
  Synthetic
gccaccaacguucccuacccccug

SEQ ID NO: 11507 - RNA, 18 nt, Artificial Sequence
  Synthetic
gucuuucuggaggcccug

SEQ ID NO: 11508 - RNA, 19 nt, Artificial Sequence
  Synthetic
ggucuuucuggaggcccug

SEQ ID NO: 11509 - RNA, 21 nt, Artificial Sequence
  Synthetic
cuggucuuucuggaggcccug

SEQ ID NO: 11510 - RNA, 22 nt, Artificial Sequence
  Synthetic
gcuggucuuucuggaggcccug

SEQ ID NO: 11511 - RNA, 23 nt, Artificial Sequence
  Synthetic
agcuggucuuucuggaggcccug

SEQ ID NO: 11512 - RNA, 24 nt, Artificial Sequence
  Synthetic
aagcuggucuuucuggaggcccug

SEQ ID NO: 11513 - RNA, 18 nt, Artificial Sequence
  Synthetic
guggccgacguggagcug

SEQ ID NO: 11514 - RNA, 19 nt, Artificial Sequence
  Synthetic
gguggccgacguggagcug

SEQ ID NO: 11515 - RNA, 21 nt, Artificial Sequence
  Synthetic
gggguggccgacguggagcug

SEQ ID NO: 11516 - RNA, 22 nt, Artificial Sequence
  Synthetic
ggggguggccgacguggagcug

SEQ ID NO: 11517 - RNA, 23 nt, Artificial Sequence
  Synthetic
uggggguggccgacguggagcug

SEQ ID NO: 11518 - RNA, 24 nt, Artificial Sequence
  Synthetic
guggggguggccgacguggagcug

SEQ ID NO: 11519 - RNA, 18 nt, Artificial Sequence
  Synthetic
gugugccacccuucgcug

SEQ ID NO: 11520 - RNA, 19 nt, Artificial Sequence
  Synthetic
cgugugccacccuucgcug

SEQ ID NO: 11521 - RNA, 21 nt, Artificial Sequence
  Synthetic
accgugugccacccuucgcug

SEQ ID NO: 11522 - RNA, 22 nt, Artificial Sequence
  Synthetic
gaccgugugccacccuucgcug

SEQ ID NO: 11523 - RNA, 23 nt, Artificial Sequence
  Synthetic
ggaccgugugccacccuucgcug

SEQ ID NO: 11524 - RNA, 24 nt, Artificial Sequence
  Synthetic
gggaccgugugccacccuucgcug

SEQ ID NO: 11525 - RNA, 18 nt, Artificial Sequence
  Synthetic
cagaugcugcacgugcug

SEQ ID NO: 11526 - RNA, 19 nt, Artificial Sequence
  Synthetic
ccagaugcugcacgugcug

SEQ ID NO: 11527 - RNA, 21 nt, Artificial Sequence
  Synthetic
gaccagaugcugcacgugcug

SEQ ID NO: 11528 - RNA, 22 nt, Artificial Sequence
  Synthetic
cgaccagaugcugcacgugcug

SEQ ID NO: 11529 - RNA, 23 nt, Artificial Sequence
  Synthetic
ccgaccagaugcugcacgugcug

SEQ ID NO: 11530 - RNA, 24 nt, Artificial Sequence
  Synthetic
gccgaccagaugcugcacgugcug

SEQ ID NO: 11531 - RNA, 18 nt, Artificial Sequence
  Synthetic
caguccuuccugaaagug

SEQ ID NO: 11532 - RNA, 19 nt, Artificial Sequence
  Synthetic
gcaguccuuccugaaagug

SEQ ID NO: 11533 - RNA, 21 nt, Artificial Sequence
  Synthetic
cugcaguccuuccugaaagug

SEQ ID NO: 11534 - RNA, 22 nt, Artificial Sequence
  Synthetic
ccugcaguccuuccugaaagug

SEQ ID NO: 11535 - RNA, 23 nt, Artificial Sequence
  Synthetic
uccugcaguccuuccugaaagug

SEQ ID NO: 11536 - RNA, 24 nt, Artificial Sequence
  Synthetic
cuccugcaguccuuccugaaagug

SEQ ID NO: 11537 - RNA, 18 nt, Artificial Sequence
  Synthetic
gccggggccgaccacgug

SEQ ID NO: 11538 - RNA, 19 nt, Artificial Sequence
  Synthetic
cgccggggccgaccacgug

SEQ ID NO: 11539 - RNA, 21 nt, Artificial Sequence
  Synthetic
uucgccggggccgaccacgug

SEQ ID NO: 11540 - RNA, 22 nt, Artificial Sequence
  Synthetic
guucgccggggccgaccacgug

SEQ ID NO: 11541 - RNA, 23 nt, Artificial Sequence
  Synthetic
uguucgccggggccgaccacgug

SEQ ID NO: 11542 - RNA, 24 nt, Artificial Sequence
  Synthetic
cuguucgccggggccgaccacgug

SEQ ID NO: 11543 - RNA, 18 nt, Artificial Sequence
  Synthetic
ugccccagcgaccccgug

SEQ ID NO: 11544 - RNA, 19 nt, Artificial Sequence
  Synthetic
gugccccagcgaccccgug

SEQ ID NO: 11545 - RNA, 21 nt, Artificial Sequence
  Synthetic
gagugccccagcgaccccgug

SEQ ID NO: 11546 - RNA, 22 nt, Artificial Sequence
  Synthetic
ggagugccccagcgaccccgug

SEQ ID NO: 11547 - RNA, 23 nt, Artificial Sequence
  Synthetic
aggagugccccagcgaccccgug

SEQ ID NO: 11548 - RNA, 24 nt, Artificial Sequence
  Synthetic
gaggagugccccagcgaccccgug

SEQ ID NO: 11549 - RNA, 18 nt, Artificial Sequence
  Synthetic
caggccaccuggcgcgug

SEQ ID NO: 11550 - RNA, 19 nt, Artificial Sequence
  Synthetic
ccaggccaccuggcgcgug

SEQ ID NO: 11551 - RNA, 21 nt, Artificial Sequence
  Synthetic
auccaggccaccuggcgcgug

SEQ ID NO: 11552 - RNA, 22 nt, Artificial Sequence
  Synthetic
gauccaggccaccuggcgcgug

SEQ ID NO: 11553 - RNA, 23 nt, Artificial Sequence
  Synthetic
agauccaggccaccuggcgcgug

SEQ ID NO: 11554 - RNA, 24 nt, Artificial Sequence
  Synthetic
gagauccaggccaccuggcgcgug

SEQ ID NO: 11555 - RNA, 18 nt, Artificial Sequence
  Synthetic
gggugccgcgaacucgug

SEQ ID NO: 11556 - RNA, 19 nt, Artificial Sequence
  Synthetic
ggggugccgcgaacucgug

SEQ ID NO: 11557 - RNA, 21 nt, Artificial Sequence
  Synthetic
ccggggugccgcgaacucgug

SEQ ID NO: 11558 - RNA, 22 nt, Artificial Sequence
  Synthetic
cccggggugccgcgaacucgug

SEQ ID NO: 11559 - RNA, 23 nt, Artificial Sequence
  Synthetic
ccccggggugccgcgaacucgug

SEQ ID NO: 11560 - RNA, 24 nt, Artificial Sequence
  Synthetic
cccccggggugccgcgaacucgug

SEQ ID NO: 11561 - RNA, 18 nt, Artificial Sequence
  Synthetic
cugcugccaccccucgug

SEQ ID NO: 11562 - RNA, 19 nt, Artificial Sequence
  Synthetic
gcugcugccaccccucgug

SEQ ID NO: 11563 - RNA, 21 nt, Artificial Sequence
  Synthetic
gcgcugcugccaccccucgug

SEQ ID NO: 11564 - RNA, 22 nt, Artificial Sequence
  Synthetic
ggcgcugcugccaccccucgug

SEQ ID NO: 11565 - RNA, 23 nt, Artificial Sequence
  Synthetic
cggcgcugcugccaccccucgug

SEQ ID NO: 11566 - RNA, 24 nt, Artificial Sequence
  Synthetic
ccggcgcugcugccaccccucgug

SEQ ID NO: 11567 - RNA, 18 nt, Artificial Sequence
  Synthetic
cuggucacggcgcucgug

SEQ ID NO: 11568 - RNA, 19 nt, Artificial Sequence
  Synthetic
ccuggucacggcgcucgug

SEQ ID NO: 11569 - RNA, 21 nt, Artificial Sequence
  Synthetic
aaccuggucacggcgcucgug

SEQ ID NO: 11570 - RNA, 22 nt, Artificial Sequence
  Synthetic
caaccuggucacggcgcucgug

SEQ ID NO: 11571 - RNA, 23 nt, Artificial Sequence
  Synthetic
ccaaccuggucacggcgcucgug

SEQ ID NO: 11572 - RNA, 24 nt, Artificial Sequence
  Synthetic
gccaaccuggucacggcgcucgug

SEQ ID NO: 11573 - RNA, 18 nt, Artificial Sequence
  Synthetic
cugcggaacgcggucgug

SEQ ID NO: 11574 - RNA, 19 nt, Artificial Sequence
  Synthetic
ccugcggaacgcggucgug

SEQ ID NO: 11575 - RNA, 21 nt, Artificial Sequence
  Synthetic
uaccugcggaacgcggucgug

SEQ ID NO: 11576 - RNA, 22 nt, Artificial Sequence
  Synthetic
guaccugcggaacgcggucgug

SEQ ID NO: 11577 - RNA, 23 nt, Artificial Sequence
  Synthetic
uguaccugcggaacgcggucgug

SEQ ID NO: 11578 - RNA, 24 nt, Artificial Sequence
  Synthetic
guguaccugcggaacgcggucgug

SEQ ID NO: 11579 - RNA, 18 nt, Artificial Sequence
  Synthetic
ccgcguucgacuucuuug

SEQ ID NO: 11580 - RNA, 19 nt, Artificial Sequence
  Synthetic
cccgcguucgacuucuuug

SEQ ID NO: 11581 - RNA, 21 nt, Artificial Sequence
  Synthetic
accccgcguucgacuucuuug

SEQ ID NO: 11582 - RNA, 22 nt, Artificial Sequence
  Synthetic
caccccgcguucgacuucuuug

SEQ ID NO: 11583 - RNA, 23 nt, Artificial Sequence
  Synthetic
gcaccccgcguucgacuucuuug

SEQ ID NO: 11584 - RNA, 24 nt, Artificial Sequence
  Synthetic
ugcaccccgcguucgacuucuuug

SEQ ID NO: 11585 - RNA, 18 nt, Artificial Sequence
  Synthetic
ccgccagcuguuuuuuug

SEQ ID NO: 11586 - RNA, 19 nt, Artificial Sequence
  Synthetic
cccgccagcuguuuuuuug

SEQ ID NO: 11587 - RNA, 21 nt, Artificial Sequence
  Synthetic
gccccgccagcuguuuuuuug

SEQ ID NO: 11588 - RNA, 22 nt, Artificial Sequence
  Synthetic
cgccccgccagcuguuuuuuug

SEQ ID NO: 11589 - RNA, 23 nt, Artificial Sequence
  Synthetic
ccgccccgccagcuguuuuuuug

SEQ ID NO: 11590 - RNA, 24 nt, Artificial Sequence
  Synthetic
cccgccccgccagcuguuuuuuug

SEQ ID NO: 11591 - RNA, 18 nt, Artificial Sequence
  Synthetic
cgagcugaaucaccuaau

SEQ ID NO: 11592 - RNA, 19 nt, Artificial Sequence
  Synthetic
ccgagcugaaucaccuaau

SEQ ID NO: 11593 - RNA, 21 nt, Artificial Sequence
  Synthetic
agccgagcugaaucaccuaau

SEQ ID NO: 11594 - RNA, 22 nt, Artificial Sequence
  Synthetic
aagccgagcugaaucaccuaau

SEQ ID NO: 11595 - RNA, 23 nt, Artificial Sequence
  Synthetic
caagccgagcugaaucaccuaau

SEQ ID NO: 11596 - RNA, 24 nt, Artificial Sequence
  Synthetic
gcaagccgagcugaaucaccuaau

SEQ ID NO: 11597 - RNA, 18 nt, Artificial Sequence
  Synthetic
cugauggccccccagcau

SEQ ID NO: 11598 - RNA, 19 nt, Artificial Sequence
  Synthetic
gcugauggccccccagcau

SEQ ID NO: 11599 - RNA, 21 nt, Artificial Sequence
  Synthetic
cugcugauggccccccagcau

SEQ ID NO: 11600 - RNA, 22 nt, Artificial Sequence
  Synthetic
ccugcugauggccccccagcau

SEQ ID NO: 11601 - RNA, 23 nt, Artificial Sequence
  Synthetic
uccugcugauggccccccagcau

SEQ ID NO: 11602 - RNA, 24 nt, Artificial Sequence
  Synthetic
auccugcugauggccccccagcau

SEQ ID NO: 11603 - RNA, 18 nt, Artificial Sequence
  Synthetic
gucucuggaacacgcgau

SEQ ID NO: 11604 - RNA, 19 nt, Artificial Sequence
  Synthetic
ugucucuggaacacgcgau

SEQ ID NO: 11605 - RNA, 21 nt, Artificial Sequence
  Synthetic
ccugucucuggaacacgcgau

SEQ ID NO: 11606 - RNA, 22 nt, Artificial Sequence
  Synthetic
gccugucucuggaacacgcgau

SEQ ID NO: 11607 - RNA, 23 nt, Artificial Sequence
  Synthetic
cgccugucucuggaacacgcgau

SEQ ID NO: 11608 - RNA, 24 nt, Artificial Sequence
  Synthetic
gcgccugucucuggaacacgcgau

SEQ ID NO: 11609 - RNA, 18 nt, Artificial Sequence
  Synthetic
caggaccgcuuugugacu

SEQ ID NO: 11610 - RNA, 19 nt, Artificial Sequence
  Synthetic
acaggaccgcuuugugacu

SEQ ID NO: 11611 - RNA, 21 nt, Artificial Sequence
  Synthetic
cgacaggaccgcuuugugacu

SEQ ID NO: 11612 - RNA, 22 nt, Artificial Sequence
  Synthetic
ccgacaggaccgcuuugugacu

SEQ ID NO: 11613 - RNA, 23 nt, Artificial Sequence
  Synthetic
uccgacaggaccgcuuugugacu

SEQ ID NO: 11614 - RNA, 24 nt, Artificial Sequence
  Synthetic
guccgacaggaccgcuuugugacu

SEQ ID NO: 11615 - RNA, 18 nt, Artificial Sequence
  Synthetic
guacgucgugaccuaccu

SEQ ID NO: 11616 - RNA, 19 nt, Artificial Sequence
  Synthetic
cguacgucgugaccuaccu

SEQ ID NO: 11617 - RNA, 21 nt, Artificial Sequence
  Synthetic
cucguacgucgugaccuaccu

SEQ ID NO: 11618 - RNA, 22 nt, Artificial Sequence
  Synthetic
ucucguacgucgugaccuaccu

SEQ ID NO: 11619 - RNA, 23 nt, Artificial Sequence
  Synthetic
gucucguacgucgugaccuaccu

SEQ ID NO: 11620 - RNA, 24 nt, Artificial Sequence
  Synthetic
ggucucguacgucgugaccuaccu

SEQ ID NO: 11621 - RNA, 18 nt, Artificial Sequence
  Synthetic
cgcggcagccguguaccu

SEQ ID NO: 11622 - RNA, 19 nt, Artificial Sequence
  Synthetic
acgcggcagccguguaccu

SEQ ID NO: 11623 - RNA, 21 nt, Artificial Sequence
  Synthetic
caacgcggcagccguguaccu

SEQ ID NO: 11624 - RNA, 22 nt, Artificial Sequence
  Synthetic
acaacgcggcagccguguaccu

SEQ ID NO: 11625 - RNA, 23 nt, Artificial Sequence
  Synthetic
gacaacgcggcagccguguaccu

SEQ ID NO: 11626 - RNA, 24 nt, Artificial Sequence
  Synthetic
ggacaacgcggcagccguguaccu

SEQ ID NO: 11627 - RNA, 18 nt, Artificial Sequence
  Synthetic
agcuguuuuugaacgccu

SEQ ID NO: 11628 - RNA, 19 nt, Artificial Sequence
  Synthetic
cagcuguuuuugaacgccu

SEQ ID NO: 11629 - RNA, 21 nt, Artificial Sequence
  Synthetic
agcagcuguuuuugaacgccu

SEQ ID NO: 11630 - RNA, 22 nt, Artificial Sequence
  Synthetic
cagcagcuguuuuugaacgccu

SEQ ID NO: 11631 - RNA, 23 nt, Artificial Sequence
  Synthetic
gcagcagcuguuuuugaacgccu

SEQ ID NO: 11632 - RNA, 24 nt, Artificial Sequence
  Synthetic
ugcagcagcuguuuuugaacgccu

SEQ ID NO: 11633 - RNA, 18 nt, Artificial Sequence
  Synthetic
ccccugguccccccggcu

SEQ ID NO: 11634 - RNA, 19 nt, Artificial Sequence
  Synthetic
cccccugguccccccggcu

SEQ ID NO: 11635 - RNA, 21 nt, Artificial Sequence
  Synthetic
gucccccugguccccccggcu

SEQ ID NO: 11636 - RNA, 22 nt, Artificial Sequence
  Synthetic
ggucccccugguccccccggcu

SEQ ID NO: 11637 - RNA, 23 nt, Artificial Sequence
  Synthetic
aggucccccugguccccccggcu

SEQ ID NO: 11638 - RNA, 24 nt, Artificial Sequence
  Synthetic
caggucccccugguccccccggcu

SEQ ID NO: 11639 - RNA, 18 nt, Artificial Sequence
  Synthetic
ccugguccccccggcucu

SEQ ID NO: 11640 - RNA, 19 nt, Artificial Sequence
  Synthetic
cccugguccccccggcucu

SEQ ID NO: 11641 - RNA, 21 nt, Artificial Sequence
  Synthetic
cccccugguccccccggcucu

SEQ ID NO: 11642 - RNA, 22 nt, Artificial Sequence
  Synthetic
ucccccugguccccccggcucu

SEQ ID NO: 11643 - RNA, 23 nt, Artificial Sequence
  Synthetic
gucccccugguccccccggcucu

SEQ ID NO: 11644 - RNA, 24 nt, Artificial Sequence
  Synthetic
ggucccccugguccccccggcucu

SEQ ID NO: 11645 - RNA, 18 nt, Artificial Sequence
  Synthetic
caggugcugcgccugucu

SEQ ID NO: 11646 - RNA, 19 nt, Artificial Sequence
  Synthetic
ccaggugcugcgccugucu

SEQ ID NO: 11647 - RNA, 21 nt, Artificial Sequence
  Synthetic
cgccaggugcugcgccugucu

SEQ ID NO: 11648 - RNA, 22 nt, Artificial Sequence
  Synthetic
ccgccaggugcugcgccugucu

SEQ ID NO: 11649 - RNA, 23 nt, Artificial Sequence
  Synthetic
accgccaggugcugcgccugucu

SEQ ID NO: 11650 - RNA, 24 nt, Artificial Sequence
  Synthetic
gaccgccaggugcugcgccugucu

SEQ ID NO: 11651 - RNA, 18 nt, Artificial Sequence
  Synthetic
agcuaaagcgaagcuucu

SEQ ID NO: 11652 - RNA, 19 nt, Artificial Sequence
  Synthetic
gagcuaaagcgaagcuucu

SEQ ID NO: 11653 - RNA, 21 nt, Artificial Sequence
  Synthetic
ccgagcuaaagcgaagcuucu

SEQ ID NO: 11654 - RNA, 22 nt, Artificial Sequence
  Synthetic
gccgagcuaaagcgaagcuucu

SEQ ID NO: 11655 - RNA, 23 nt, Artificial Sequence
  Synthetic
cgccgagcuaaagcgaagcuucu

SEQ ID NO: 11656 - RNA, 24 nt, Artificial Sequence
  Synthetic
ucgccgagcuaaagcgaagcuucu

SEQ ID NO: 11657 - RNA, 18 nt, Artificial Sequence
  Synthetic
cugagaacgugcuguucu

SEQ ID NO: 11658 - RNA, 19 nt, Artificial Sequence
  Synthetic
acugagaacgugcuguucu

SEQ ID NO: 11659 - RNA, 21 nt, Artificial Sequence
  Synthetic
ugacugagaacgugcuguucu

SEQ ID NO: 11660 - RNA, 22 nt, Artificial Sequence
  Synthetic
gugacugagaacgugcuguucu

SEQ ID NO: 11661 - RNA, 23 nt, Artificial Sequence
  Synthetic
ugugacugagaacgugcuguucu

SEQ ID NO: 11662 - RNA, 24 nt, Artificial Sequence
  Synthetic
uugugacugagaacgugcuguucu

SEQ ID NO: 11663 - RNA, 18 nt, Artificial Sequence
  Synthetic
ggcaaggccgugcgaagu

SEQ ID NO: 11664 - RNA, 19 nt, Artificial Sequence
  Synthetic
gggcaaggccgugcgaagu

SEQ ID NO: 11665 - RNA, 21 nt, Artificial Sequence
  Synthetic
augggcaaggccgugcgaagu

SEQ ID NO: 11666 - RNA, 22 nt, Artificial Sequence
  Synthetic
gaugggcaaggccgugcgaagu

SEQ ID NO: 11667 - RNA, 23 nt, Artificial Sequence
  Synthetic
ugaugggcaaggccgugcgaagu

SEQ ID NO: 11668 - RNA, 24 nt, Artificial Sequence
  Synthetic
gugaugggcaaggccgugcgaagu

SEQ ID NO: 11669 - RNA, 18 nt, Artificial Sequence
  Synthetic
cgugaugggcaaggccgu

SEQ ID NO: 11670 - RNA, 19 nt, Artificial Sequence
  Synthetic
ucgugaugggcaaggccgu

SEQ ID NO: 11671 - RNA, 21 nt, Artificial Sequence
  Synthetic
gcucgugaugggcaaggccgu

SEQ ID NO: 11672 - RNA, 22 nt, Artificial Sequence
  Synthetic
cgcucgugaugggcaaggccgu

SEQ ID NO: 11673 - RNA, 23 nt, Artificial Sequence
  Synthetic
gcgcucgugaugggcaaggccgu

SEQ ID NO: 11674 - RNA, 24 nt, Artificial Sequence
  Synthetic
ggcgcucgugaugggcaaggccgu

SEQ ID NO: 11675 - RNA, 18 nt, Artificial Sequence
  Synthetic
ucgaagccgccaauccgu

SEQ ID NO: 11676 - RNA, 19 nt, Artificial Sequence
  Synthetic
gucgaagccgccaauccgu

SEQ ID NO: 11677 - RNA, 21 nt, Artificial Sequence
  Synthetic
ccgucgaagccgccaauccgu

SEQ ID NO: 11678 - RNA, 22 nt, Artificial Sequence
  Synthetic
cccgucgaagccgccaauccgu

SEQ ID NO: 11679 - RNA, 23 nt, Artificial Sequence
  Synthetic
ccccgucgaagccgccaauccgu

SEQ ID NO: 11680 - RNA, 24 nt, Artificial Sequence
  Synthetic
accccgucgaagccgccaauccgu

SEQ ID NO: 11681 - RNA, 18 nt, Artificial Sequence
  Synthetic
uguucucggagcgcgcgu

SEQ ID NO: 11682 - RNA, 19 nt, Artificial Sequence
  Synthetic
cuguucucggagcgcgcgu

SEQ ID NO: 11683 - RNA, 21 nt, Artificial Sequence
  Synthetic
ugcuguucucggagcgcgcgu

SEQ ID NO: 11684 - RNA, 22 nt, Artificial Sequence
  Synthetic
gugcuguucucggagcgcgcgu

SEQ ID NO: 11685 - RNA, 23 nt, Artificial Sequence
  Synthetic
cgugcuguucucggagcgcgcgu

SEQ ID NO: 11686 - RNA, 24 nt, Artificial Sequence
  Synthetic
acgugcuguucucggagcgcgcgu

SEQ ID NO: 11687 - RNA, 18 nt, Artificial Sequence
  Synthetic
aggccguccucggggcgu

SEQ ID NO: 11688 - RNA, 19 nt, Artificial Sequence
  Synthetic
caggccguccucggggcgu

SEQ ID NO: 11689 - RNA, 21 nt, Artificial Sequence
  Synthetic
uccaggccguccucggggcgu

SEQ ID NO: 11690 - RNA, 22 nt, Artificial Sequence
  Synthetic
guccaggccguccucggggcgu

SEQ ID NO: 11691 - RNA, 23 nt, Artificial Sequence
  Synthetic
cguccaggccguccucggggcgu

SEQ ID NO: 11692 - RNA, 24 nt, Artificial Sequence
  Synthetic
acguccaggccguccucggggcgu

SEQ ID NO: 11693 - RNA, 18 nt, Artificial Sequence
  Synthetic
gcugcugccaccccucgu

SEQ ID NO: 11694 - RNA, 19 nt, Artificial Sequence
  Synthetic
cgcugcugccaccccucgu

SEQ ID NO: 11695 - RNA, 21 nt, Artificial Sequence
  Synthetic
ggcgcugcugccaccccucgu

SEQ ID NO: 11696 - RNA, 22 nt, Artificial Sequence
  Synthetic
cggcgcugcugccaccccucgu

SEQ ID NO: 11697 - RNA, 23 nt, Artificial Sequence
  Synthetic
ccggcgcugcugccaccccucgu

SEQ ID NO: 11698 - RNA, 24 nt, Artificial Sequence
  Synthetic
cccggcgcugcugccaccccucgu

SEQ ID NO: 11699 - RNA, 18 nt, Artificial Sequence
  Synthetic
cgucgcagcgauuuucgu

SEQ ID NO: 11700 - RNA, 19 nt, Artificial Sequence
  Synthetic
gcgucgcagcgauuuucgu

SEQ ID NO: 11701 - RNA, 21 nt, Artificial Sequence
  Synthetic
gggcgucgcagcgauuuucgu

SEQ ID NO: 11702 - RNA, 22 nt, Artificial Sequence
  Synthetic
ugggcgucgcagcgauuuucgu

SEQ ID NO: 11703 - RNA, 23 nt, Artificial Sequence
  Synthetic
gugggcgucgcagcgauuuucgu

SEQ ID NO: 11704 - RNA, 24 nt, Artificial Sequence
  Synthetic
cgugggcgucgcagcgauuuucgu

SEQ ID NO: 11705 - RNA, 18 nt, Artificial Sequence
  Synthetic
gaacguugacgcggcggu

SEQ ID NO: 11706 - RNA, 19 nt, Artificial Sequence
  Synthetic
ugaacguugacgcggcggu

SEQ ID NO: 11707 - RNA, 21 nt, Artificial Sequence
  Synthetic
gaugaacguugacgcggcggu

SEQ ID NO: 11708 - RNA, 22 nt, Artificial Sequence
  Synthetic
ugaugaacguugacgcggcggu

SEQ ID NO: 11709 - RNA, 23 nt, Artificial Sequence
  Synthetic
cugaugaacguugacgcggcggu

SEQ ID NO: 11710 - RNA, 24 nt, Artificial Sequence
  Synthetic
gcugaugaacguugacgcggcggu

SEQ ID NO: 11711 - RNA, 18 nt, Artificial Sequence
  Synthetic
gcuauguccggcggcguu

SEQ ID NO: 11712 - RNA, 19 nt, Artificial Sequence
  Synthetic
cgcuauguccggcggcguu

SEQ ID NO: 11713 - RNA, 21 nt, Artificial Sequence
  Synthetic
ggcgcuauguccggcggcguu

SEQ ID NO: 11714 - RNA, 22 nt, Artificial Sequence
  Synthetic
uggcgcuauguccggcggcguu

SEQ ID NO: 11715 - RNA, 23 nt, Artificial Sequence
  Synthetic
cuggcgcuauguccggcggcguu

SEQ ID NO: 11716 - RNA, 24 nt, Artificial Sequence
  Synthetic
ccuggcgcuauguccggcggcguu

SEQ ID NO: 11717 - RNA, 18 nt, Artificial Sequence
  Synthetic
ggcgagaagcuggucuuu

SEQ ID NO: 11718 - RNA, 19 nt, Artificial Sequence
  Synthetic
cggcgagaagcuggucuuu

SEQ ID NO: 11719 - RNA, 21 nt, Artificial Sequence
  Synthetic
aucggcgagaagcuggucuuu

SEQ ID NO: 11720 - RNA, 22 nt, Artificial Sequence
  Synthetic
caucggcgagaagcuggucuuu

SEQ ID NO: 11721 - RNA, 23 nt, Artificial Sequence
  Synthetic
ccaucggcgagaagcuggucuuu

SEQ ID NO: 11722 - RNA, 24 nt, Artificial Sequence
  Synthetic
uccaucggcgagaagcuggucuuu

SEQ ID NO: 11723 - RNA, 18 nt, Artificial Sequence
  Synthetic
cccgcguucgacuucuuu

SEQ ID NO: 11724 - RNA, 19 nt, Artificial Sequence
  Synthetic
ccccgcguucgacuucuuu

SEQ ID NO: 11725 - RNA, 21 nt, Artificial Sequence
  Synthetic
caccccgcguucgacuucuuu

SEQ ID NO: 11726 - RNA, 22 nt, Artificial Sequence
  Synthetic
gcaccccgcguucgacuucuuu

SEQ ID NO: 11727 - RNA, 23 nt, Artificial Sequence
  Synthetic
ugcaccccgcguucgacuucuuu

SEQ ID NO: 11728 - RNA, 24 nt, Artificial Sequence
  Synthetic
cugcaccccgcguucgacuucuuu

SEQ ID NO: 11729 - RNA, 18 nt, Artificial Sequence
  Synthetic
gacccguguggccuguuu

SEQ ID NO: 11730 - RNA, 19 nt, Artificial Sequence
  Synthetic
ggacccguguggccuguuu

SEQ ID NO: 11731 - RNA, 21 nt, Artificial Sequence
  Synthetic
gaggacccguguggccuguuu

SEQ ID NO: 11732 - RNA, 22 nt, Artificial Sequence
  Synthetic
ggaggacccguguggccuguuu

SEQ ID NO: 11733 - RNA, 23 nt, Artificial Sequence
  Synthetic
uggaggacccguguggccuguuu

SEQ ID NO: 11734 - RNA, 24 nt, Artificial Sequence
  Synthetic
guggaggacccguguggccuguuu

SEQ ID NO: 11735 - RNA, 18 nt, Artificial Sequence
  Synthetic
gacaugcagcagcuguuu

SEQ ID NO: 11736 - RNA, 19 nt, Artificial Sequence
  Synthetic
agacaugcagcagcuguuu

SEQ ID NO: 11737 - RNA, 21 nt, Artificial Sequence
  Synthetic
gcagacaugcagcagcuguuu

SEQ ID NO: 11738 - RNA, 22 nt, Artificial Sequence
  Synthetic
cgcagacaugcagcagcuguuu

SEQ ID NO: 11739 - RNA, 23 nt, Artificial Sequence
  Synthetic
ccgcagacaugcagcagcuguuu

SEQ ID NO: 11740 - RNA, 24 nt, Artificial Sequence
  Synthetic
gccgcagacaugcagcagcuguuu

SEQ ID NO: 11741 - RNA, 18 nt, Artificial Sequence
  Synthetic
gccccgccagcuguuuuu

SEQ ID NO: 11742 - RNA, 19 nt, Artificial Sequence
  Synthetic
cgccccgccagcuguuuuu

SEQ ID NO: 11743 - RNA, 21 nt, Artificial Sequence
  Synthetic
cccgccccgccagcuguuuuu

SEQ ID NO: 11744 - RNA, 22 nt, Artificial Sequence
  Synthetic
ucccgccccgccagcuguuuuu

SEQ ID NO: 11745 - RNA, 23 nt, Artificial Sequence
  Synthetic
uucccgccccgccagcuguuuuu

SEQ ID NO: 11746 - RNA, 24 nt, Artificial Sequence
  Synthetic
cuucccgccccgccagcuguuuuu

SEQ ID NO: 11747 - RNA, 18 nt, Artificial Sequence
  Synthetic
ccccgccagcuguuuuuu

SEQ ID NO: 11748 - RNA, 19 nt, Artificial Sequence
  Synthetic
gccccgccagcuguuuuuu

SEQ ID NO: 11749 - RNA, 21 nt, Artificial Sequence
  Synthetic
ccgccccgccagcuguuuuuu

SEQ ID NO: 11750 - RNA, 22 nt, Artificial Sequence
  Synthetic
cccgccccgccagcuguuuuuu

SEQ ID NO: 11751 - RNA, 23 nt, Artificial Sequence
  Synthetic
ucccgccccgccagcuguuuuuu

SEQ ID NO: 11752 - RNA, 24 nt, Artificial Sequence
  Synthetic
uucccgccccgccagcuguuuuuu

SEQ ID NO: 11753 - RNA, 18 nt, Artificial Sequence
  Synthetic
cccgccagcuguuuuuuu

SEQ ID NO: 11754 - RNA, 19 nt, Artificial Sequence
  Synthetic
ccccgccagcuguuuuuuu

SEQ ID NO: 11755 - RNA, 21 nt, Artificial Sequence
  Synthetic
cgccccgccagcuguuuuuuu

SEQ ID NO: 11756 - RNA, 22 nt, Artificial Sequence
  Synthetic
ccgccccgccagcuguuuuuuu

SEQ ID NO: 11757 - RNA, 23 nt, Artificial Sequence
  Synthetic
cccgccccgccagcuguuuuuuu

SEQ ID NO: 11758 - RNA, 24 nt, Artificial Sequence
  Synthetic
ucccgccccgccagcuguuuuuuu

SEQ ID NO: 11759 - RNA, 17 nt, Artificial Sequence
  Synthetic
gcaacacccugucgcuc

SEQ ID NO: 11760 - RNA, 20 nt, Artificial Sequence
  Synthetic
auugcaacacccugucgcuc

SEQ ID NO: 11761 - RNA, 17 nt, Artificial Sequence
  Synthetic
ccguacgucaccggcac

SEQ ID NO: 11762 - RNA, 17 nt, Artificial Sequence
  Synthetic
cuggaaaaggcgccgcc

SEQ ID NO: 11763 - RNA, 17 nt, Artificial Sequence
  Synthetic
ccucgccggugcucagc

SEQ ID NO: 11764 - RNA, 17 nt, Artificial Sequence
  Synthetic
gaaaaagcucgucucgc

SEQ ID NO: 11765 - RNA, 17 nt, Artificial Sequence
  Synthetic
ccagggccuccagaaag

SEQ ID NO: 11766 - RNA, 17 nt, Artificial Sequence
  Synthetic
uggucgccgagcuaaag

SEQ ID NO: 11767 - RNA, 17 nt, Artificial Sequence
  Synthetic
agcucgucucgcagaag

SEQ ID NO: 11768 - RNA, 17 nt, Artificial Sequence
  Synthetic
cgcauuaggugauucag

SEQ ID NO: 11769 - RNA, 17 nt, Artificial Sequence
  Synthetic
cguugguggcggcguag

SEQ ID NO: 11770 - RNA, 17 nt, Artificial Sequence
  Synthetic
gcugcugcaccgcgggg

SEQ ID NO: 11771 - RNA, 17 nt, Artificial Sequence
  Synthetic
uacgccccguacggauu

SEQ ID NO: 11772 - RNA, 20 nt, Artificial Sequence
  Synthetic
ucgccguacgucaccggcac

SEQ ID NO: 11773 - RNA, 20 nt, Artificial Sequence
  Synthetic
cugcuggaaaaggcgccgcc

SEQ ID NO: 11774 - RNA, 20 nt, Artificial Sequence
  Synthetic
gggccucgccggugcucagc

SEQ ID NO: 11775 - RNA, 20 nt, Artificial Sequence
  Synthetic
caggaaaaagcucgucucgc

SEQ ID NO: 11776 - RNA, 20 nt, Artificial Sequence
  Synthetic
ucuccagggccuccagaaag

SEQ ID NO: 11777 - RNA, 20 nt, Artificial Sequence
  Synthetic
cccuggucgccgagcuaaag

SEQ ID NO: 11778 - RNA, 20 nt, Artificial Sequence
  Synthetic
aaaagcucgucucgcagaag

SEQ ID NO: 11779 - RNA, 20 nt, Artificial Sequence
  Synthetic
gguucaccgucguccgacag

SEQ ID NO: 11780 - RNA, 20 nt, Artificial Sequence
  Synthetic
ucucgcauuaggugauucag

SEQ ID NO: 11781 - RNA, 20 nt, Artificial Sequence
  Synthetic
gaacguugguggcggcguag

SEQ ID NO: 11782 - RNA, 20 nt, Artificial Sequence
  Synthetic
gccgcugcugcaccgcgggg

SEQ ID NO: 11783 - RNA, 17 nt, Artificial Sequence
  Synthetic
guuccacgcgcgguuua

SEQ ID NO: 11784 - RNA, 17 nt, Artificial Sequence
  Synthetic
gccaccggaaaacaucg

SEQ ID NO: 11785 - RNA, 17 nt, Artificial Sequence
  Synthetic
gcgauguuuuccggugg

SEQ ID NO: 11786 - RNA, 20 nt, Artificial Sequence
  Synthetic
ggaacaaccgcgauguuuuc

SEQ ID NO: 11787 - RNA, 20 nt, Artificial Sequence
  Synthetic
gcgcggcccaguuccacgcg

SEQ ID NO: 11788 - RNA, 20 nt, Artificial Sequence
  Synthetic
gccgccaccggaaaacaucg

SEQ ID NO: 11789 - RNA, 20 nt, Artificial Sequence
  Synthetic
gcgauguuuuccgguggcgg

SEQ ID NO: 11790 - RNA, 17 nt, Artificial Sequence
  Synthetic
uaaaccgcgcguggaac

SEQ ID NO: 11791 - RNA, 17 nt, Artificial Sequence
  Synthetic
acaaccgcgauguuuuc

SEQ ID NO: 11792 - RNA, 17 nt, Artificial Sequence
  Synthetic
cguccauaaaccgcgcg

SEQ ID NO: 11793 - RNA, 17 nt, Artificial Sequence
  Synthetic
accgcgauguuuuccgg

SEQ ID NO: 11794 - RNA, 17 nt, Artificial Sequence
  Synthetic
aaaccgcgcguggaacu

SEQ ID NO: 11795 - RNA, 20 nt, Artificial Sequence
  Synthetic
ccaguuccacgcgcgguuua

SEQ ID NO: 11796 - RNA, 20 nt, Artificial Sequence
  Synthetic
ccauaaaccgcgcguggaac

SEQ ID NO: 11797 - RNA, 20 nt, Artificial Sequence
  Synthetic
uggcguccauaaaccgcgcg

SEQ ID NO: 11798 - RNA, 20 nt, Artificial Sequence
  Synthetic
acaaccgcgauguuuuccgg

SEQ ID NO: 11799 - RNA, 20 nt, Artificial Sequence
  Synthetic
accgcgauguuuuccggugg

SEQ ID NO: 11800 - RNA, 20 nt, Artificial Sequence
  Synthetic
cauaaaccgcgcguggaacu

SEQ ID NO: 11801 - RNA, 17 nt, Artificial Sequence
  Synthetic
cggcccaguuccacgcg

SEQ ID NO: 11802 - RNA, 17 nt, Artificial Sequence
  Synthetic
auguuuuccgguggcgg

SEQ ID NO: 11803 - RNA, 17 nt, Artificial Sequence
  Synthetic
ucuuuagggguucgggu

SEQ ID NO: 11804 - RNA, 17 nt, Artificial Sequence
  Synthetic
ccgagagucuguuaaaa

SEQ ID NO: 11805 - RNA, 17 nt, Artificial Sequence
  Synthetic
gccguacuguuucacaa

SEQ ID NO: 11806 - RNA, 17 nt, Artificial Sequence
  Synthetic
ggcgacgccgugggcaa

SEQ ID NO: 11807 - RNA, 17 nt, Artificial Sequence
  Synthetic
gguaagaugcucaucaa

SEQ ID NO: 11808 - RNA, 17 nt, Artificial Sequence
  Synthetic
ucaugcuagaguaucaa

SEQ ID NO: 11809 - RNA, 17 nt, Artificial Sequence
  Synthetic
agcuuggccagcaagaa

SEQ ID NO: 11810 - RNA, 17 nt, Artificial Sequence
  Synthetic
cgccuggccgaccagaa

SEQ ID NO: 11811 - RNA, 17 nt, Artificial Sequence
  Synthetic
gugcccggccaccggaa

SEQ ID NO: 11812 - RNA, 17 nt, Artificial Sequence
  Synthetic
ggguacggccgcaugaa

SEQ ID NO: 11813 - RNA, 17 nt, Artificial Sequence
  Synthetic
cgugccguaaacgugaa

SEQ ID NO: 11814 - RNA, 17 nt, Artificial Sequence
  Synthetic
agcaagauaaaggugaa

SEQ ID NO: 11815 - RNA, 17 nt, Artificial Sequence
  Synthetic
gaagcgcagcaagauaa

SEQ ID NO: 11816 - RNA, 17 nt, Artificial Sequence
  Synthetic
ggcguuauucccaaaca

SEQ ID NO: 11817 - RNA, 17 nt, Artificial Sequence
  Synthetic
cggcgucgcccugaaca

SEQ ID NO: 11818 - RNA, 17 nt, Artificial Sequence
  Synthetic
ggccguacuguuucaca

SEQ ID NO: 11819 - RNA, 17 nt, Artificial Sequence
  Synthetic
caucaucuacggggaca

SEQ ID NO: 11820 - RNA, 17 nt, Artificial Sequence
  Synthetic
gcugacggacauuuaca

SEQ ID NO: 11821 - RNA, 17 nt, Artificial Sequence
  Synthetic
gucgaauuccagaacca

SEQ ID NO: 11822 - RNA, 17 nt, Artificial Sequence
  Synthetic
aaacagcaggucgacca

SEQ ID NO: 11823 - RNA, 17 nt, Artificial Sequence
  Synthetic
auucugccggacaccca

SEQ ID NO: 11824 - RNA, 17 nt, Artificial Sequence
  Synthetic
cgccaucuugucgccca

SEQ ID NO: 11825 - RNA, 17 nt, Artificial Sequence
  Synthetic
gcauacgccauugccca

SEQ ID NO: 11826 - RNA, 17 nt, Artificial Sequence
  Synthetic
gaacgagcuggcggcca

SEQ ID NO: 11827 - RNA, 17 nt, Artificial Sequence
  Synthetic
caggacggcuucggcca

SEQ ID NO: 11828 - RNA, 17 nt, Artificial Sequence
  Synthetic
gggguaccagggggcca

SEQ ID NO: 11829 - RNA, 17 nt, Artificial Sequence
  Synthetic
uaucaaccgcaccucca

SEQ ID NO: 11830 - RNA, 17 nt, Artificial Sequence
  Synthetic
caggaggacgugcucca

SEQ ID NO: 11831 - RNA, 17 nt, Artificial Sequence
  Synthetic
uucacgggagugcagca

SEQ ID NO: 11832 - RNA, 17 nt, Artificial Sequence
  Synthetic
cugcuuguccaggagca

SEQ ID NO: 11833 - RNA, 17 nt, Artificial Sequence
  Synthetic
cgcggcuccggaccgca

SEQ ID NO: 11834 - RNA, 17 nt, Artificial Sequence
  Synthetic
agaucucugcgagcgca

SEQ ID NO: 11835 - RNA, 17 nt, Artificial Sequence
  Synthetic
gcccggggacucgcgca

SEQ ID NO: 11836 - RNA, 17 nt, Artificial Sequence
  Synthetic
gcggaucugcuuucgca

SEQ ID NO: 11837 - RNA, 17 nt, Artificial Sequence
  Synthetic
gcggcaacgugcaggca

SEQ ID NO: 11838 - RNA, 17 nt, Artificial Sequence
  Synthetic
gauaaaggugaacggca

SEQ ID NO: 11839 - RNA, 17 nt, Artificial Sequence
  Synthetic
cuuggccggggagggca

SEQ ID NO: 11840 - RNA, 17 nt, Artificial Sequence
  Synthetic
gcaccuggaggcgggca

SEQ ID NO: 11841 - RNA, 17 nt, Artificial Sequence
  Synthetic
cugcagucccucgggca

SEQ ID NO: 11842 - RNA, 17 nt, Artificial Sequence
  Synthetic
cuucgauaucgaaugca

SEQ ID NO: 11843 - RNA, 17 nt, Artificial Sequence
  Synthetic
gcagcaggccgccauca

SEQ ID NO: 11844 - RNA, 17 nt, Artificial Sequence
  Synthetic
gcaggucccguccauca

SEQ ID NO: 11845 - RNA, 17 nt, Artificial Sequence
  Synthetic
ggguaagaugcucauca

SEQ ID NO: 11846 - RNA, 17 nt, Artificial Sequence
  Synthetic
gcugugccgcggccuca

SEQ ID NO: 11847 - RNA, 17 nt, Artificial Sequence
  Synthetic
gguguauuacaagcuca

SEQ ID NO: 11848 - RNA, 17 nt, Artificial Sequence
  Synthetic
acggcuguucuucguca

SEQ ID NO: 11849 - RNA, 17 nt, Artificial Sequence
  Synthetic
acccggaagugggguca

SEQ ID NO: 11850 - RNA, 17 nt, Artificial Sequence
  Synthetic
ggcgugcgugacauuca

SEQ ID NO: 11851 - RNA, 17 nt, Artificial Sequence
  Synthetic
guaauaguccguguuca

SEQ ID NO: 11852 - RNA, 17 nt, Artificial Sequence
  Synthetic
ggccgugggcgacaaga

SEQ ID NO: 11853 - RNA, 17 nt, Artificial Sequence
  Synthetic
cagcuuggccagcaaga

SEQ ID NO: 11854 - RNA, 17 nt, Artificial Sequence
  Synthetic
ccugaaggacaagaaga

SEQ ID NO: 11855 - RNA, 17 nt, Artificial Sequence
  Synthetic
gcgccuggccgaccaga

SEQ ID NO: 11856 - RNA, 17 nt, Artificial Sequence
  Synthetic
ccgcgagguagaggaga

SEQ ID NO: 11857 - RNA, 17 nt, Artificial Sequence
  Synthetic
caucaccgacccggaga

SEQ ID NO: 11858 - RNA, 17 nt, Artificial Sequence
  Synthetic
ggcggccgcuccggaga

SEQ ID NO: 11859 - RNA, 17 nt, Artificial Sequence
  Synthetic
uccggcccgguuugaga

SEQ ID NO: 11860 - RNA, 17 nt, Artificial Sequence
  Synthetic
cugcuggccgucguaga

SEQ ID NO: 11861 - RNA, 17 nt, Artificial Sequence
  Synthetic
acccgcaccaucuacga

SEQ ID NO: 11862 - RNA, 17 nt, Artificial Sequence
  Synthetic
gccaucaagaaguacga

SEQ ID NO: 11863 - RNA, 17 nt, Artificial Sequence
  Synthetic
gcgcgaccccugcccga

SEQ ID NO: 11864 - RNA, 17 nt, Artificial Sequence
  Synthetic
gucgcuggaugucccga

SEQ ID NO: 11865 - RNA, 17 nt, Artificial Sequence
  Synthetic
gagacgguaccagccga

SEQ ID NO: 11866 - RNA, 17 nt, Artificial Sequence
  Synthetic
ggucggugaugcgccga

SEQ ID NO: 11867 - RNA, 17 nt, Artificial Sequence
  Synthetic
cagcaucucgcggccga

SEQ ID NO: 11868 - RNA, 17 nt, Artificial Sequence
  Synthetic
ccugcacguugccgcga

SEQ ID NO: 11869 - RNA, 17 nt, Artificial Sequence
  Synthetic
ggggggucggcaggcga

SEQ ID NO: 11870 - RNA, 17 nt, Artificial Sequence
  Synthetic
ucgaggugggggggcga

SEQ ID NO: 11871 - RNA, 17 nt, Artificial Sequence
  Synthetic
gcucaugccccccucga

SEQ ID NO: 11872 - RNA, 17 nt, Artificial Sequence
  Synthetic
ggccaggagcuguucga

SEQ ID NO: 11873 - RNA, 17 nt, Artificial Sequence
  Synthetic
cuucuuguccuucagga

SEQ ID NO: 11874 - RNA, 17 nt, Artificial Sequence
  Synthetic
augggcgucuacgagga

SEQ ID NO: 11875 - RNA, 17 nt, Artificial Sequence
  Synthetic
cugggccugacuccgga

SEQ ID NO: 11876 - RNA, 17 nt, Artificial Sequence
  Synthetic
ggcgucuagcucgcgga

SEQ ID NO: 11877 - RNA, 17 nt, Artificial Sequence
  Synthetic
gggcgcuuggccgggga

SEQ ID NO: 11878 - RNA, 17 nt, Artificial Sequence
  Synthetic
uacaaggucccccugga

SEQ ID NO: 11879 - RNA, 17 nt, Artificial Sequence
  Synthetic
uuucacaagggucauga

SEQ ID NO: 11880 - RNA, 17 nt, Artificial Sequence
  Synthetic
gcccaggagcgugauga

SEQ ID NO: 11881 - RNA, 17 nt, Artificial Sequence
  Synthetic
gcgccuggcccaccuga

SEQ ID NO: 11882 - RNA, 17 nt, Artificial Sequence
  Synthetic
cagcacgcucucccuga

SEQ ID NO: 11883 - RNA, 17 nt, Artificial Sequence
  Synthetic
ggccgaagccguccuga

SEQ ID NO: 11884 - RNA, 17 nt, Artificial Sequence
  Synthetic
cuugcuggccaagcuga

SEQ ID NO: 11885 - RNA, 17 nt, Artificial Sequence
  Synthetic
cacggccgccgggcuga

SEQ ID NO: 11886 - RNA, 17 nt, Artificial Sequence
  Synthetic
gguccccgucgguguga

SEQ ID NO: 11887 - RNA, 17 nt, Artificial Sequence
  Synthetic
guuacacacgaccuuga

SEQ ID NO: 11888 - RNA, 17 nt, Artificial Sequence
  Synthetic
cgggauccgguccuuga

SEQ ID NO: 11889 - RNA, 17 nt, Artificial Sequence
  Synthetic
acccucguacuucuuga

SEQ ID NO: 11890 - RNA, 17 nt, Artificial Sequence
  Synthetic
augaugcgcauggaaua

SEQ ID NO: 11891 - RNA, 17 nt, Artificial Sequence
  Synthetic
ggugggugccggcgcua

SEQ ID NO: 11892 - RNA, 17 nt, Artificial Sequence
  Synthetic
acccuugugaaacagua

SEQ ID NO: 11893 - RNA, 17 nt, Artificial Sequence
  Synthetic
gucccccuggacgggua

SEQ ID NO: 11894 - RNA, 17 nt, Artificial Sequence
  Synthetic
cgucgaguuuaacugua

SEQ ID NO: 11895 - RNA, 17 nt, Artificial Sequence
  Synthetic
guguguaacucggugua

SEQ ID NO: 11896 - RNA, 17 nt, Artificial Sequence
  Synthetic
cacccaggggcgauuua

SEQ ID NO: 11897 - RNA, 17 nt, Artificial Sequence
  Synthetic
guggccguucacguuua

SEQ ID NO: 11898 - RNA, 17 nt, Artificial Sequence
  Synthetic
uggcguuauucccaaac

SEQ ID NO: 11899 - RNA, 17 nt, Artificial Sequence
  Synthetic
cugguaccgucucaaac

SEQ ID NO: 11900 - RNA, 17 nt, Artificial Sequence
  Synthetic
gguuguccaggaugaac

SEQ ID NO: 11901 - RNA, 17 nt, Artificial Sequence
  Synthetic
ucgaauuccagaaccac

SEQ ID NO: 11902 - RNA, 17 nt, Artificial Sequence
  Synthetic
aagucgaacaccaccac

SEQ ID NO: 11903 - RNA, 17 nt, Artificial Sequence
  Synthetic
ugacuccggaaggccac

SEQ ID NO: 11904 - RNA, 17 nt, Artificial Sequence
  Synthetic
agagcgugcugaagcac

SEQ ID NO: 11905 - RNA, 17 nt, Artificial Sequence
  Synthetic
ggcagaaguugucgcac

SEQ ID NO: 11906 - RNA, 17 nt, Artificial Sequence
  Synthetic
caggucguagagcagac

SEQ ID NO: 11907 - RNA, 17 nt, Artificial Sequence
  Synthetic
acaaggaggaggucgac

SEQ ID NO: 11908 - RNA, 17 nt, Artificial Sequence
  Synthetic
acaucaucaacuucgac

SEQ ID NO: 11909 - RNA, 17 nt, Artificial Sequence
  Synthetic
ucccguccaucaaggac

SEQ ID NO: 11910 - RNA, 17 nt, Artificial Sequence
  Synthetic
gcauccuccugcgggac

SEQ ID NO: 11911 - RNA, 17 nt, Artificial Sequence
  Synthetic
uccgguccuugauggac

SEQ ID NO: 11912 - RNA, 17 nt, Artificial Sequence
  Synthetic
acaaggucccccuggac

SEQ ID NO: 11913 - RNA, 17 nt, Artificial Sequence
  Synthetic
ccagggcggugguggac

SEQ ID NO: 11914 - RNA, 17 nt, Artificial Sequence
  Synthetic
ggccccgaguucgugac

SEQ ID NO: 11915 - RNA, 17 nt, Artificial Sequence
  Synthetic
cggcgaguacugcauac

SEQ ID NO: 11916 - RNA, 17 nt, Artificial Sequence
  Synthetic
gggcaugagcgaccuac

SEQ ID NO: 11917 - RNA, 17 nt, Artificial Sequence
  Synthetic
gggccacgaucacguac

SEQ ID NO: 11918 - RNA, 17 nt, Artificial Sequence
  Synthetic
ggaugaugcugggguac

SEQ ID NO: 11919 - RNA, 17 nt, Artificial Sequence
  Synthetic
ugaacaucgacauguac

SEQ ID NO: 11920 - RNA, 17 nt, Artificial Sequence
  Synthetic
uguguaacucgguguac

SEQ ID NO: 11921 - RNA, 17 nt, Artificial Sequence
  Synthetic
ugguaccgucucaaacc

SEQ ID NO: 11922 - RNA, 17 nt, Artificial Sequence
  Synthetic
cuguacggcggacaacc

SEQ ID NO: 11923 - RNA, 17 nt, Artificial Sequence
  Synthetic
guuguccaggaugaacc

SEQ ID NO: 11924 - RNA, 17 nt, Artificial Sequence
  Synthetic
gggucgacgccaccacc

SEQ ID NO: 11925 - RNA, 17 nt, Artificial Sequence
  Synthetic
gacuccggaaggccacc

SEQ ID NO: 11926 - RNA, 17 nt, Artificial Sequence
  Synthetic
aaacgugaacggccacc

SEQ ID NO: 11927 - RNA, 17 nt, Artificial Sequence
  Synthetic
aaaacagcaggucgacc

SEQ ID NO: 11928 - RNA, 17 nt, Artificial Sequence
  Synthetic
aggauaucuggaugacc

SEQ ID NO: 11929 - RNA, 17 nt, Artificial Sequence
  Synthetic
gccccgaguucgugacc

SEQ ID NO: 11930 - RNA, 17 nt, Artificial Sequence
  Synthetic
guugaugauguuguacc

SEQ ID NO: 11931 - RNA, 17 nt, Artificial Sequence
  Synthetic
uucauccuggacaaccc

SEQ ID NO: 11932 - RNA, 17 nt, Artificial Sequence
  Synthetic
ccgaaggugacgaaccc

SEQ ID NO: 11933 - RNA, 17 nt, Artificial Sequence
  Synthetic
aguggggucaaggaccc

SEQ ID NO: 11934 - RNA, 17 nt, Artificial Sequence
  Synthetic
ucauccuggacaacccc

SEQ ID NO: 11935 - RNA, 17 nt, Artificial Sequence
  Synthetic
cgaaguguggcaccccc

SEQ ID NO: 11936 - RNA, 17 nt, Artificial Sequence
  Synthetic
cuugggcgccucccccc

SEQ ID NO: 11937 - RNA, 17 nt, Artificial Sequence
  Synthetic
ccgacaugcgcgccccc

SEQ ID NO: 11938 - RNA, 17 nt, Artificial Sequence
  Synthetic
caaggacccuggccccc

SEQ ID NO: 11939 - RNA, 17 nt, Artificial Sequence
  Synthetic
cauuuacaagguccccc

SEQ ID NO: 11940 - RNA, 17 nt, Artificial Sequence
  Synthetic
gccgacaugcgcgcccc

SEQ ID NO: 11941 - RNA, 17 nt, Artificial Sequence
  Synthetic
cgccccuaaaucgcccc

SEQ ID NO: 11942 - RNA, 17 nt, Artificial Sequence
  Synthetic
gggcgugggcaggcccc

SEQ ID NO: 11943 - RNA, 17 nt, Artificial Sequence
  Synthetic
gcccugcgcgagucccc

SEQ ID NO: 11944 - RNA, 17 nt, Artificial Sequence
  Synthetic
ccgcaccuccagggccc

SEQ ID NO: 11945 - RNA, 17 nt, Artificial Sequence
  Synthetic
cgcggcccugcccuccc

SEQ ID NO: 11946 - RNA, 17 nt, Artificial Sequence
  Synthetic
ccgcuccucguccuccc

SEQ ID NO: 11947 - RNA, 17 nt, Artificial Sequence
  Synthetic
ggcccugcgcgaguccc

SEQ ID NO: 11948 - RNA, 17 nt, Artificial Sequence
  Synthetic
gcccacggccgucagcc

SEQ ID NO: 11949 - RNA, 17 nt, Artificial Sequence
  Synthetic
ccgccuacuacgccgcc

SEQ ID NO: 11950 - RNA, 17 nt, Artificial Sequence
  Synthetic
gcggccucacggccgcc

SEQ ID NO: 11951 - RNA, 17 nt, Artificial Sequence
  Synthetic
guacaccaacaagcgcc

SEQ ID NO: 11952 - RNA, 17 nt, Artificial Sequence
  Synthetic
uacgugccugcugcgcc

SEQ ID NO: 11953 - RNA, 17 nt, Artificial Sequence
  Synthetic
cggccgcaugaacggcc

SEQ ID NO: 11954 - RNA, 17 nt, Artificial Sequence
  Synthetic
agcguguuguuccggcc

SEQ ID NO: 11955 - RNA, 17 nt, Artificial Sequence
  Synthetic
agcccuucuggucggcc

SEQ ID NO: 11956 - RNA, 17 nt, Artificial Sequence
  Synthetic
cccgcguugcgcgggcc

SEQ ID NO: 11957 - RNA, 17 nt, Artificial Sequence
  Synthetic
ugggguaccagggggcc

SEQ ID NO: 11958 - RNA, 17 nt, Artificial Sequence
  Synthetic
acaccgucaggugggcc

SEQ ID NO: 11959 - RNA, 17 nt, Artificial Sequence
  Synthetic
agcacagguugugggcc

SEQ ID NO: 11960 - RNA, 17 nt, Artificial Sequence
  Synthetic
ugccccccucgauggcc

SEQ ID NO: 11961 - RNA, 17 nt, Artificial Sequence
  Synthetic
cguacuucuugauggcc

SEQ ID NO: 11962 - RNA, 17 nt, Artificial Sequence
  Synthetic
uggccuuuccgguggcc

SEQ ID NO: 11963 - RNA, 17 nt, Artificial Sequence
  Synthetic
gugcgacaacuucugcc

SEQ ID NO: 11964 - RNA, 17 nt, Artificial Sequence
  Synthetic
cagguccuccgggugcc

SEQ ID NO: 11965 - RNA, 17 nt, Artificial Sequence
  Synthetic
cccggagagggacaucc

SEQ ID NO: 11966 - RNA, 17 nt, Artificial Sequence
  Synthetic
guaccccagcaucaucc

SEQ ID NO: 11967 - RNA, 17 nt, Artificial Sequence
  Synthetic
caccacccgguucaucc

SEQ ID NO: 11968 - RNA, 17 nt, Artificial Sequence
  Synthetic
uuaucaaccgcaccucc

SEQ ID NO: 11969 - RNA, 17 nt, Artificial Sequence
  Synthetic
aguccuugcccgccucc

SEQ ID NO: 11970 - RNA, 17 nt, Artificial Sequence
  Synthetic
gccgcuccucguccucc

SEQ ID NO: 11971 - RNA, 17 nt, Artificial Sequence
  Synthetic
ggaugaccagguccucc

SEQ ID NO: 11972 - RNA, 17 nt, Artificial Sequence
  Synthetic
ggccuucgaacagcucc

SEQ ID NO: 11973 - RNA, 17 nt, Artificial Sequence
  Synthetic
gaccgucaucacgcucc

SEQ ID NO: 11974 - RNA, 17 nt, Artificial Sequence
  Synthetic
acaggaggacgugcucc

SEQ ID NO: 11975 - RNA, 17 nt, Artificial Sequence
  Synthetic
cgaggaggccgugcucc

SEQ ID NO: 11976 - RNA, 17 nt, Artificial Sequence
  Synthetic
cccccaccucgaucucc

SEQ ID NO: 11977 - RNA, 17 nt, Artificial Sequence
  Synthetic
ccuggaugucccucucc

SEQ ID NO: 11978 - RNA, 17 nt, Artificial Sequence
  Synthetic
cggugaggacaaagucc

SEQ ID NO: 11979 - RNA, 17 nt, Artificial Sequence
  Synthetic
cgaacccgggguugucc

SEQ ID NO: 11980 - RNA, 17 nt, Artificial Sequence
  Synthetic
uccuugaccccacuucc

SEQ ID NO: 11981 - RNA, 17 nt, Artificial Sequence
  Synthetic
gcgucuacguccgaagc

SEQ ID NO: 11982 - RNA, 17 nt, Artificial Sequence
  Synthetic
aaaacuuaaaaaacagc

SEQ ID NO: 11983 - RNA, 17 nt, Artificial Sequence
  Synthetic
uaucgucguaaaacagc

SEQ ID NO: 11984 - RNA, 17 nt, Artificial Sequence
  Synthetic
caacacgcuagcccagc

SEQ ID NO: 11985 - RNA, 17 nt, Artificial Sequence
  Synthetic
gcuccuggacaagcagc

SEQ ID NO: 11986 - RNA, 17 nt, Artificial Sequence
  Synthetic
ggucggccaggcgcagc

SEQ ID NO: 11987 - RNA, 17 nt, Artificial Sequence
  Synthetic
acgcgguaaaacagagc

SEQ ID NO: 11988 - RNA, 17 nt, Artificial Sequence
  Synthetic
aucccaccugaacgagc

SEQ ID NO: 11989 - RNA, 17 nt, Artificial Sequence
  Synthetic
gcugcugguguccgagc

SEQ ID NO: 11990 - RNA, 17 nt, Artificial Sequence
  Synthetic
gcgcggcuccggaccgc

SEQ ID NO: 11991 - RNA, 17 nt, Artificial Sequence
  Synthetic
cccgccuacuacgccgc

SEQ ID NO: 11992 - RNA, 17 nt, Artificial Sequence
  Synthetic
cgcggccucacggccgc

SEQ ID NO: 11993 - RNA, 17 nt, Artificial Sequence
  Synthetic
aaggccaucggggccgc

SEQ ID NO: 11994 - RNA, 17 nt, Artificial Sequence
  Synthetic
gccagccacuccuccgc

SEQ ID NO: 11995 - RNA, 17 nt, Artificial Sequence
  Synthetic
uuccuccgccguagcgc

SEQ ID NO: 11996 - RNA, 17 nt, Artificial Sequence
  Synthetic
aguacguccacgcgcgc

SEQ ID NO: 11997 - RNA, 17 nt, Artificial Sequence
  Synthetic
uguugguguacgcgcgc

SEQ ID NO: 11998 - RNA, 17 nt, Artificial Sequence
  Synthetic
cauggcccgccgcgcgc

SEQ ID NO: 11999 - RNA, 17 nt, Artificial Sequence
  Synthetic
cgcccggggacucgcgc

SEQ ID NO: 12000 - RNA, 17 nt, Artificial Sequence
  Synthetic
aucaccccgcguugcgc

SEQ ID NO: 12001 - RNA, 17 nt, Artificial Sequence
  Synthetic
cgcguggacguacucgc

SEQ ID NO: 12002 - RNA, 17 nt, Artificial Sequence
  Synthetic
cgucuccucuaccucgc

SEQ ID NO: 12003 - RNA, 17 nt, Artificial Sequence
  Synthetic
guuaaacucgacgucgc

SEQ ID NO: 12004 - RNA, 17 nt, Artificial Sequence
  Synthetic
gaugcugggguacaggc

SEQ ID NO: 12005 - RNA, 17 nt, Artificial Sequence
  Synthetic
guggcgcaccuggaggc

SEQ ID NO: 12006 - RNA, 17 nt, Artificial Sequence
  Synthetic
ccaucggggccgccggc

SEQ ID NO: 12007 - RNA, 17 nt, Artificial Sequence
  Synthetic
cgggaccugcgcgcggc

SEQ ID NO: 12008 - RNA, 17 nt, Artificial Sequence
  Synthetic
ggagacggucgcgcggc

SEQ ID NO: 12009 - RNA, 17 nt, Artificial Sequence
  Synthetic
uccucccgggcugcggc

SEQ ID NO: 12010 - RNA, 17 nt, Artificial Sequence
  Synthetic
ccucccggggggucggc

SEQ ID NO: 12011 - RNA, 17 nt, Artificial Sequence
  Synthetic
gguucgucaccuucggc

SEQ ID NO: 12012 - RNA, 17 nt, Artificial Sequence
  Synthetic
gcuuggccggggagggc

SEQ ID NO: 12013 - RNA, 17 nt, Artificial Sequence
  Synthetic
gaaccacgggcgugggc

SEQ ID NO: 12014 - RNA, 17 nt, Artificial Sequence
  Synthetic
ucguacuucuugauggc

SEQ ID NO: 12015 - RNA, 17 nt, Artificial Sequence
  Synthetic
ccccgcggaggaguggc

SEQ ID NO: 12016 - RNA, 17 nt, Artificial Sequence
  Synthetic
cuggccuuuccgguggc

SEQ ID NO: 12017 - RNA, 17 nt, Artificial Sequence
  Synthetic
gccgucgcgcgcuuggc

SEQ ID NO: 12018 - RNA, 17 nt, Artificial Sequence
  Synthetic
ugggcaauggcguaugc

SEQ ID NO: 12019 - RNA, 17 nt, Artificial Sequence
  Synthetic
cacaugagcuuguaugc

SEQ ID NO: 12020 - RNA, 17 nt, Artificial Sequence
  Synthetic
ccugcccgagggacugc

SEQ ID NO: 12021 - RNA, 17 nt, Artificial Sequence
  Synthetic
cauacaggauucccugc

SEQ ID NO: 12022 - RNA, 17 nt, Artificial Sequence
  Synthetic
guaccccacgugccugc

SEQ ID NO: 12023 - RNA, 17 nt, Artificial Sequence
  Synthetic
ccucagcauccuccugc

SEQ ID NO: 12024 - RNA, 17 nt, Artificial Sequence
  Synthetic
caagccccgcaagcugc

SEQ ID NO: 12025 - RNA, 17 nt, Artificial Sequence
  Synthetic
uaaagacgcggaucugc

SEQ ID NO: 12026 - RNA, 17 nt, Artificial Sequence
  Synthetic
gaagggcuuuauucugc

SEQ ID NO: 12027 - RNA, 17 nt, Artificial Sequence
  Synthetic
ccgucgcggcaacgugc

SEQ ID NO: 12028 - RNA, 17 nt, Artificial Sequence
  Synthetic
uucggggcggugggugc

SEQ ID NO: 12029 - RNA, 17 nt, Artificial Sequence
  Synthetic
gccgucguagauggugc

SEQ ID NO: 12030 - RNA, 17 nt, Artificial Sequence
  Synthetic
ggacaccagcagcuugc

SEQ ID NO: 12031 - RNA, 17 nt, Artificial Sequence
  Synthetic
cgacuggcccuucuugc

SEQ ID NO: 12032 - RNA, 17 nt, Artificial Sequence
  Synthetic
augucccgaaggccauc

SEQ ID NO: 12033 - RNA, 17 nt, Artificial Sequence
  Synthetic
cgaucacguacgggauc

SEQ ID NO: 12034 - RNA, 17 nt, Artificial Sequence
  Synthetic
caucaagggcguggauc

SEQ ID NO: 12035 - RNA, 17 nt, Artificial Sequence
  Synthetic
agagcagacaggauauc

SEQ ID NO: 12036 - RNA, 17 nt, Artificial Sequence
  Synthetic
uacccggucacgaacuc

SEQ ID NO: 12037 - RNA, 17 nt, Artificial Sequence
  Synthetic
gucucccgcgcgcccuc

SEQ ID NO: 12038 - RNA, 17 nt, Artificial Sequence
  Synthetic
aacgccugcagucccuc

SEQ ID NO: 12039 - RNA, 17 nt, Artificial Sequence
  Synthetic
aggagcacggccuccuc

SEQ ID NO: 12040 - RNA, 17 nt, Artificial Sequence
  Synthetic
uccucccccuccuccuc

SEQ ID NO: 12041 - RNA, 17 nt, Artificial Sequence
  Synthetic
uggaugaccagguccuc

SEQ ID NO: 12042 - RNA, 17 nt, Artificial Sequence
  Synthetic
ggaugucgcgauagcuc

SEQ ID NO: 12043 - RNA, 17 nt, Artificial Sequence
  Synthetic
acguggccgcgcggcuc

SEQ ID NO: 12044 - RNA, 17 nt, Artificial Sequence
  Synthetic
gcuucuggaaguggcuc

SEQ ID NO: 12045 - RNA, 17 nt, Artificial Sequence
  Synthetic
uccuggaugucccucuc

SEQ ID NO: 12046 - RNA, 17 nt, Artificial Sequence
  Synthetic
gguggccuuccggaguc

SEQ ID NO: 12047 - RNA, 17 nt, Artificial Sequence
  Synthetic
gcuuguaauacaccguc

SEQ ID NO: 12048 - RNA, 17 nt, Artificial Sequence
  Synthetic
ggaggcgcccaagcguc

SEQ ID NO: 12049 - RNA, 17 nt, Artificial Sequence
  Synthetic
ccucuaccucgcggguc

SEQ ID NO: 12050 - RNA, 17 nt, Artificial Sequence
  Synthetic
aaucgccccuggguguc

SEQ ID NO: 12051 - RNA, 17 nt, Artificial Sequence
  Synthetic
guccuugaccccacuuc

SEQ ID NO: 12052 - RNA, 17 nt, Artificial Sequence
  Synthetic
gcagaauaaagcccuuc

SEQ ID NO: 12053 - RNA, 17 nt, Artificial Sequence
  Synthetic
cggccccgauggccuuc

SEQ ID NO: 12054 - RNA, 17 nt, Artificial Sequence
  Synthetic
ccuucuucuuguccuuc

SEQ ID NO: 12055 - RNA, 17 nt, Artificial Sequence
  Synthetic
agggacugcaggcguuc

SEQ ID NO: 12056 - RNA, 17 nt, Artificial Sequence
  Synthetic
uggccgccagcucguuc

SEQ ID NO: 12057 - RNA, 17 nt, Artificial Sequence
  Synthetic
uccggaccgcaggguuc

SEQ ID NO: 12058 - RNA, 17 nt, Artificial Sequence
  Synthetic
aguaauaguccguguuc

SEQ ID NO: 12059 - RNA, 17 nt, Artificial Sequence
  Synthetic
gggcuagcguguuguuc

SEQ ID NO: 12060 - RNA, 17 nt, Artificial Sequence
  Synthetic
ggacgagcuggccuuuc

SEQ ID NO: 12061 - RNA, 17 nt, Artificial Sequence
  Synthetic
cgcgucuacguccgaag

SEQ ID NO: 12062 - RNA, 17 nt, Artificial Sequence
  Synthetic
ccaccuccgccucgaag

SEQ ID NO: 12063 - RNA, 17 nt, Artificial Sequence
  Synthetic
ugcugcgcuucuggaag

SEQ ID NO: 12064 - RNA, 17 nt, Artificial Sequence
  Synthetic
ggcacgugggguaccag

SEQ ID NO: 12065 - RNA, 17 nt, Artificial Sequence
  Synthetic
aacgagcuggcggccag

SEQ ID NO: 12066 - RNA, 17 nt, Artificial Sequence
  Synthetic
ccugagggccgacgcag

SEQ ID NO: 12067 - RNA, 17 nt, Artificial Sequence
  Synthetic
ugcagucccucgggcag

SEQ ID NO: 12068 - RNA, 17 nt, Artificial Sequence
  Synthetic
ucuggggaauccgcgag

SEQ ID NO: 12069 - RNA, 17 nt, Artificial Sequence
  Synthetic
cgauaccgucuccggag

SEQ ID NO: 12070 - RNA, 17 nt, Artificial Sequence
  Synthetic
acccaggggcgauuuag

SEQ ID NO: 12071 - RNA, 17 nt, Artificial Sequence
  Synthetic
ggggcgcucggcuaacg

SEQ ID NO: 12072 - RNA, 17 nt, Artificial Sequence
  Synthetic
agucgaacaccaccacg

SEQ ID NO: 12073 - RNA, 17 nt, Artificial Sequence
  Synthetic
uucacguuuacggcacg

SEQ ID NO: 12074 - RNA, 17 nt, Artificial Sequence
  Synthetic
gcaggcacguaaagacg

SEQ ID NO: 12075 - RNA, 17 nt, Artificial Sequence
  Synthetic
cgcuucggacguagacg

SEQ ID NO: 12076 - RNA, 17 nt, Artificial Sequence
  Synthetic
acgccaucacaccgacg

SEQ ID NO: 12077 - RNA, 17 nt, Artificial Sequence
  Synthetic
caugcgcaucaucuacg

SEQ ID NO: 12078 - RNA, 17 nt, Artificial Sequence
  Synthetic
caucggcgucaucuacg

SEQ ID NO: 12079 - RNA, 17 nt, Artificial Sequence
  Synthetic
gccgaugggcgucuacg

SEQ ID NO: 12080 - RNA, 17 nt, Artificial Sequence
  Synthetic
ggccaucaagaaguacg

SEQ ID NO: 12081 - RNA, 17 nt, Artificial Sequence
  Synthetic
cgaaggugacgaacccg

SEQ ID NO: 12082 - RNA, 17 nt, Artificial Sequence
  Synthetic
guuucacgugaaccccg

SEQ ID NO: 12083 - RNA, 17 nt, Artificial Sequence
  Synthetic
gggccugcccacgcccg

SEQ ID NO: 12084 - RNA, 17 nt, Artificial Sequence
  Synthetic
gcauggaauagggcccg

SEQ ID NO: 12085 - RNA, 17 nt, Artificial Sequence
  Synthetic
ggcgacggcgucucccg

SEQ ID NO: 12086 - RNA, 17 nt, Artificial Sequence
  Synthetic
cuacaagcucaacgccg

SEQ ID NO: 12087 - RNA, 17 nt, Artificial Sequence
  Synthetic
uguucagggcgacgccg

SEQ ID NO: 12088 - RNA, 17 nt, Artificial Sequence
  Synthetic
cggcggccgugaggccg

SEQ ID NO: 12089 - RNA, 17 nt, Artificial Sequence
  Synthetic
ggccgcaugaacggccg

SEQ ID NO: 12090 - RNA, 17 nt, Artificial Sequence
  Synthetic
cgccgggcugacggccg

SEQ ID NO: 12091 - RNA, 17 nt, Artificial Sequence
  Synthetic
ggacucgcgcagggccg

SEQ ID NO: 12092 - RNA, 17 nt, Artificial Sequence
  Synthetic
cugcgagcgcauggccg

SEQ ID NO: 12093 - RNA, 17 nt, Artificial Sequence
  Synthetic
gguguccgagcuggccg

SEQ ID NO: 12094 - RNA, 17 nt, Artificial Sequence
  Synthetic
aucuuugugcugugccg

SEQ ID NO: 12095 - RNA, 17 nt, Artificial Sequence
  Synthetic
guuccgcggcaucuccg

SEQ ID NO: 12096 - RNA, 17 nt, Artificial Sequence
  Synthetic
ccgggcgcgucguuccg

SEQ ID NO: 12097 - RNA, 17 nt, Artificial Sequence
  Synthetic
cgcgguaaaacagagcg

SEQ ID NO: 12098 - RNA, 17 nt, Artificial Sequence
  Synthetic
cguggcccagacccgcg

SEQ ID NO: 12099 - RNA, 17 nt, Artificial Sequence
  Synthetic
ugcgguccggagccgcg

SEQ ID NO: 12100 - RNA, 17 nt, Artificial Sequence
  Synthetic
cggacgacguggccgcg

SEQ ID NO: 12101 - RNA, 17 nt, Artificial Sequence
  Synthetic
ccagccacuccuccgcg

SEQ ID NO: 12102 - RNA, 17 nt, Artificial Sequence
  Synthetic
uuguugguguacgcgcg

SEQ ID NO: 12103 - RNA, 17 nt, Artificial Sequence
  Synthetic
uggacgggaccugcgcg

SEQ ID NO: 12104 - RNA, 17 nt, Artificial Sequence
  Synthetic
uagaggagacggucgcg

SEQ ID NO: 12105 - RNA, 17 nt, Artificial Sequence
  Synthetic
cggcggcguaguaggcg

SEQ ID NO: 12106 - RNA, 17 nt, Artificial Sequence
  Synthetic
gaugcucaucaagggcg

SEQ ID NO: 12107 - RNA, 17 nt, Artificial Sequence
  Synthetic
uuccagaaccacgggcg

SEQ ID NO: 12108 - RNA, 17 nt, Artificial Sequence
  Synthetic
agagaucucguggggcg

SEQ ID NO: 12109 - RNA, 17 nt, Artificial Sequence
  Synthetic
gacaccagcagcuugcg

SEQ ID NO: 12110 - RNA, 17 nt, Artificial Sequence
  Synthetic
gaucaccccgcguugcg

SEQ ID NO: 12111 - RNA, 17 nt, Artificial Sequence
  Synthetic
ugucccgaaggccaucg

SEQ ID NO: 12112 - RNA, 17 nt, Artificial Sequence
  Synthetic
ggacuaccuggagaucg

SEQ ID NO: 12113 - RNA, 17 nt, Artificial Sequence
  Synthetic
gaucccguacgugaucg

SEQ ID NO: 12114 - RNA, 17 nt, Artificial Sequence
  Synthetic
acccggucacgaacucg

SEQ ID NO: 12115 - RNA, 17 nt, Artificial Sequence
  Synthetic
gcgcguggacguacucg

SEQ ID NO: 12116 - RNA, 17 nt, Artificial Sequence
  Synthetic
ccgucuccucuaccucg

SEQ ID NO: 12117 - RNA, 17 nt, Artificial Sequence
  Synthetic
ggagcacggccuccucg

SEQ ID NO: 12118 - RNA, 17 nt, Artificial Sequence
  Synthetic
gaaagcagauccgcucg

SEQ ID NO: 12119 - RNA, 17 nt, Artificial Sequence
  Synthetic
ucgcgagcagcaucucg

SEQ ID NO: 12120 - RNA, 17 nt, Artificial Sequence
  Synthetic
gauggucgucaccgucg

SEQ ID NO: 12121 - RNA, 17 nt, Artificial Sequence
  Synthetic
cuccgcggaccacuucg

SEQ ID NO: 12122 - RNA, 17 nt, Artificial Sequence
  Synthetic
gggacugcaggcguucg

SEQ ID NO: 12123 - RNA, 17 nt, Artificial Sequence
  Synthetic
ccggaccgcaggguucg

SEQ ID NO: 12124 - RNA, 17 nt, Artificial Sequence
  Synthetic
gcacgugggguaccagg

SEQ ID NO: 12125 - RNA, 17 nt, Artificial Sequence
  Synthetic
ggccguacccguccagg

SEQ ID NO: 12126 - RNA, 17 nt, Artificial Sequence
  Synthetic
cgagccagucccgcagg

SEQ ID NO: 12127 - RNA, 17 nt, Artificial Sequence
  Synthetic
uguaauacaccgucagg

SEQ ID NO: 12128 - RNA, 17 nt, Artificial Sequence
  Synthetic
caaccuggccaucgagg

SEQ ID NO: 12129 - RNA, 17 nt, Artificial Sequence
  Synthetic
uuacaugaacaaggagg

SEQ ID NO: 12130 - RNA, 17 nt, Artificial Sequence
  Synthetic
ggccgauuucccggagg

SEQ ID NO: 12131 - RNA, 17 nt, Artificial Sequence
  Synthetic
ccacuucgaggcggagg

SEQ ID NO: 12132 - RNA, 17 nt, Artificial Sequence
  Synthetic
aguggcgcaccuggagg

SEQ ID NO: 12133 - RNA, 17 nt, Artificial Sequence
  Synthetic
gcaggaggaugcugagg

SEQ ID NO: 12134 - RNA, 17 nt, Artificial Sequence
  Synthetic
aucggcgucaucuacgg

SEQ ID NO: 12135 - RNA, 17 nt, Artificial Sequence
  Synthetic
cgaguuuaacuguacgg

SEQ ID NO: 12136 - RNA, 17 nt, Artificial Sequence
  Synthetic
cgugaacggccacccgg

SEQ ID NO: 12137 - RNA, 17 nt, Artificial Sequence
  Synthetic
gguggccgggcacccgg

SEQ ID NO: 12138 - RNA, 17 nt, Artificial Sequence
  Synthetic
cacggccgucagcccgg

SEQ ID NO: 12139 - RNA, 17 nt, Artificial Sequence
  Synthetic
cauggaauagggcccgg

SEQ ID NO: 12140 - RNA, 17 nt, Artificial Sequence
  Synthetic
gcguugcgcgggcccgg

SEQ ID NO: 12141 - RNA, 17 nt, Artificial Sequence
  Synthetic
uuggacgcgccucccgg

SEQ ID NO: 12142 - RNA, 17 nt, Artificial Sequence
  Synthetic
gcgacggcgucucccgg

SEQ ID NO: 12143 - RNA, 17 nt, Artificial Sequence
  Synthetic
ccuggccgauuucccgg

SEQ ID NO: 12144 - RNA, 17 nt, Artificial Sequence
  Synthetic
cacgcuagcccagccgg

SEQ ID NO: 12145 - RNA, 17 nt, Artificial Sequence
  Synthetic
ccccacgugccugccgg

SEQ ID NO: 12146 - RNA, 17 nt, Artificial Sequence
  Synthetic
gcggccacgucguccgg

SEQ ID NO: 12147 - RNA, 17 nt, Artificial Sequence
  Synthetic
cgagcuggccuuuccgg

SEQ ID NO: 12148 - RNA, 17 nt, Artificial Sequence
  Synthetic
gcgcucggcuaacgcgg

SEQ ID NO: 12149 - RNA, 17 nt, Artificial Sequence
  Synthetic
acgggaccugcgcgcgg

SEQ ID NO: 12150 - RNA, 17 nt, Artificial Sequence
  Synthetic
cggcgucuagcucgcgg

SEQ ID NO: 12151 - RNA, 17 nt, Artificial Sequence
  Synthetic
ggaccacuucgaggcgg

SEQ ID NO: 12152 - RNA, 17 nt, Artificial Sequence
  Synthetic
gacgugcuccagggcgg

SEQ ID NO: 12153 - RNA, 17 nt, Artificial Sequence
  Synthetic
cgcaggguucggggcgg

SEQ ID NO: 12154 - RNA, 17 nt, Artificial Sequence
  Synthetic
cucguccccuggggcgg

SEQ ID NO: 12155 - RNA, 17 nt, Artificial Sequence
  Synthetic
gugucugcucaguucgg

SEQ ID NO: 12156 - RNA, 17 nt, Artificial Sequence
  Synthetic
gaggacgugcuccaggg

SEQ ID NO: 12157 - RNA, 17 nt, Artificial Sequence
  Synthetic
aaccuggccaucgaggg

SEQ ID NO: 12158 - RNA, 17 nt, Artificial Sequence
  Synthetic
gucuagcucgcggaggg

SEQ ID NO: 12159 - RNA, 17 nt, Artificial Sequence
  Synthetic
guccaggaugaaccggg

SEQ ID NO: 12160 - RNA, 17 nt, Artificial Sequence
  Synthetic
uccggaaggccaccggg

SEQ ID NO: 12161 - RNA, 17 nt, Artificial Sequence
  Synthetic
ccugccgaccccccggg

SEQ ID NO: 12162 - RNA, 17 nt, Artificial Sequence
  Synthetic
uccggccgcagcccggg

SEQ ID NO: 12163 - RNA, 17 nt, Artificial Sequence
  Synthetic
uggacgcgccucccggg

SEQ ID NO: 12164 - RNA, 17 nt, Artificial Sequence
  Synthetic
cggccacgucguccggg

SEQ ID NO: 12165 - RNA, 17 nt, Artificial Sequence
  Synthetic
ggggcgcuuggccgggg

SEQ ID NO: 12166 - RNA, 17 nt, Artificial Sequence
  Synthetic
ucaggugggauucgggg

SEQ ID NO: 12167 - RNA, 17 nt, Artificial Sequence
  Synthetic
gaccgcaggguucgggg

SEQ ID NO: 12168 - RNA, 17 nt, Artificial Sequence
  Synthetic
uaggggcgccggggggg

SEQ ID NO: 12169 - RNA, 17 nt, Artificial Sequence
  Synthetic
augcaaggcgggggggg

SEQ ID NO: 12170 - RNA, 17 nt, Artificial Sequence
  Synthetic
cucccaccuguuggggg

SEQ ID NO: 12171 - RNA, 17 nt, Artificial Sequence
  Synthetic
gggcucguccccugggg

SEQ ID NO: 12172 - RNA, 17 nt, Artificial Sequence
  Synthetic
uggagaucgaggugggg

SEQ ID NO: 12173 - RNA, 17 nt, Artificial Sequence
  Synthetic
cacucgaguuugauggg

SEQ ID NO: 12174 - RNA, 17 nt, Artificial Sequence
  Synthetic
cguccacgcgcgcuggg

SEQ ID NO: 12175 - RNA, 17 nt, Artificial Sequence
  Synthetic
cuggagaucgagguggg

SEQ ID NO: 12176 - RNA, 17 nt, Artificial Sequence
  Synthetic
acacacgaccuugaugg

SEQ ID NO: 12177 - RNA, 17 nt, Artificial Sequence
  Synthetic
gcacucgaguuugaugg

SEQ ID NO: 12178 - RNA, 17 nt, Artificial Sequence
  Synthetic
cgcaguggcgcaccugg

SEQ ID NO: 12179 - RNA, 17 nt, Artificial Sequence
  Synthetic
gucgaccagggcccugg

SEQ ID NO: 12180 - RNA, 17 nt, Artificial Sequence
  Synthetic
ccaccugaacgagcugg

SEQ ID NO: 12181 - RNA, 17 nt, Artificial Sequence
  Synthetic
acaggauucccugcugg

SEQ ID NO: 12182 - RNA, 17 nt, Artificial Sequence
  Synthetic
ucacgugaaccccgugg

SEQ ID NO: 12183 - RNA, 17 nt, Artificial Sequence
  Synthetic
gugcuccagggcggugg

SEQ ID NO: 12184 - RNA, 17 nt, Artificial Sequence
  Synthetic
caggaugaaccgggugg

SEQ ID NO: 12185 - RNA, 17 nt, Artificial Sequence
  Synthetic
ggccgucgcgcgcuugg

SEQ ID NO: 12186 - RNA, 17 nt, Artificial Sequence
  Synthetic
cuucucccaccuguugg

SEQ ID NO: 12187 - RNA, 17 nt, Artificial Sequence
  Synthetic
cgccccggccguucaug

SEQ ID NO: 12188 - RNA, 17 nt, Artificial Sequence
  Synthetic
gccgagagcuccagaug

SEQ ID NO: 12189 - RNA, 17 nt, Artificial Sequence
  Synthetic
acagcgcgcgcgagaug

SEQ ID NO: 12190 - RNA, 17 nt, Artificial Sequence
  Synthetic
caccgccccgaacccug

SEQ ID NO: 12191 - RNA, 17 nt, Artificial Sequence
  Synthetic
ggcgggcucguccccug

SEQ ID NO: 12192 - RNA, 17 nt, Artificial Sequence
  Synthetic
ucagcacgcucucccug

SEQ ID NO: 12193 - RNA, 17 nt, Artificial Sequence
  Synthetic
cucguccucccgggcug

SEQ ID NO: 12194 - RNA, 17 nt, Artificial Sequence
  Synthetic
gggccuggaugaugcug

SEQ ID NO: 12195 - RNA, 17 nt, Artificial Sequence
  Synthetic
gguuuauucccgaagug

SEQ ID NO: 12196 - RNA, 17 nt, Artificial Sequence
  Synthetic
cgugaaacccggaagug

SEQ ID NO: 12197 - RNA, 17 nt, Artificial Sequence
  Synthetic
ccgccggcaggcacgug

SEQ ID NO: 12198 - RNA, 17 nt, Artificial Sequence
  Synthetic
ucagcccggcggccgug

SEQ ID NO: 12199 - RNA, 17 nt, Artificial Sequence
  Synthetic
cucgcagagaucucgug

SEQ ID NO: 12200 - RNA, 17 nt, Artificial Sequence
  Synthetic
ccagggcccuggaggug

SEQ ID NO: 12201 - RNA, 17 nt, Artificial Sequence
  Synthetic
ugcucaguucggcggug

SEQ ID NO: 12202 - RNA, 17 nt, Artificial Sequence
  Synthetic
caagaaguacgagggug

SEQ ID NO: 12203 - RNA, 17 nt, Artificial Sequence
  Synthetic
ggccgucguagauggug

SEQ ID NO: 12204 - RNA, 17 nt, Artificial Sequence
  Synthetic
ugcugaagcacagguug

SEQ ID NO: 12205 - RNA, 17 nt, Artificial Sequence
  Synthetic
acuucucccaccuguug

SEQ ID NO: 12206 - RNA, 17 nt, Artificial Sequence
  Synthetic
ggccgccuccgggaaau

SEQ ID NO: 12207 - RNA, 17 nt, Artificial Sequence
  Synthetic
gaugaugcgcauggaau

SEQ ID NO: 12208 - RNA, 17 nt, Artificial Sequence
  Synthetic
uuucgcgugugggacau

SEQ ID NO: 12209 - RNA, 17 nt, Artificial Sequence
  Synthetic
gccaagaaaaaguacau

SEQ ID NO: 12210 - RNA, 17 nt, Artificial Sequence
  Synthetic
gcgacggugacgaccau

SEQ ID NO: 12211 - RNA, 17 nt, Artificial Sequence
  Synthetic
uccucguagacgcccau

SEQ ID NO: 12212 - RNA, 17 nt, Artificial Sequence
  Synthetic
ggccgagagcuccagau

SEQ ID NO: 12213 - RNA, 17 nt, Artificial Sequence
  Synthetic
gucggugaugcgccgau

SEQ ID NO: 12214 - RNA, 17 nt, Artificial Sequence
  Synthetic
gcgcaacgcggggugau

SEQ ID NO: 12215 - RNA, 17 nt, Artificial Sequence
  Synthetic
caaggucguguguaacu

SEQ ID NO: 12216 - RNA, 17 nt, Artificial Sequence
  Synthetic
gccccuaaaucgccccu

SEQ ID NO: 12217 - RNA, 17 nt, Artificial Sequence
  Synthetic
gggcgggcucguccccu

SEQ ID NO: 12218 - RNA, 17 nt, Artificial Sequence
  Synthetic
gaacgccugcagucccu

SEQ ID NO: 12219 - RNA, 17 nt, Artificial Sequence
  Synthetic
ggcguaugcgggauccu

SEQ ID NO: 12220 - RNA, 17 nt, Artificial Sequence
  Synthetic
accgucaucacgcuccu

SEQ ID NO: 12221 - RNA, 17 nt, Artificial Sequence
  Synthetic
gggauccucggccagcu

SEQ ID NO: 12222 - RNA, 17 nt, Artificial Sequence
  Synthetic
ggcgaucagcagcagcu

SEQ ID NO: 12223 - RNA, 17 nt, Artificial Sequence
  Synthetic
guaaauguccgucagcu

SEQ ID NO: 12224 - RNA, 17 nt, Artificial Sequence
  Synthetic
ggcugcggccggacgcu

SEQ ID NO: 12225 - RNA, 17 nt, Artificial Sequence
  Synthetic
guacguccacgcgcgcu

SEQ ID NO: 12226 - RNA, 17 nt, Artificial Sequence
  Synthetic
cucggccgucgcgcgcu

SEQ ID NO: 12227 - RNA, 17 nt, Artificial Sequence
  Synthetic
cuccuccgcggggcgcu

SEQ ID NO: 12228 - RNA, 17 nt, Artificial Sequence
  Synthetic
cgucucccgggggcgcu

SEQ ID NO: 12229 - RNA, 17 nt, Artificial Sequence
  Synthetic
guccuccuguuuucgcu

SEQ ID NO: 12230 - RNA, 17 nt, Artificial Sequence
  Synthetic
caucggggccgccggcu

SEQ ID NO: 12231 - RNA, 17 nt, Artificial Sequence
  Synthetic
cagcagcuugcggggcu

SEQ ID NO: 12232 - RNA, 17 nt, Artificial Sequence
  Synthetic
ugggccuggaugaugcu

SEQ ID NO: 12233 - RNA, 17 nt, Artificial Sequence
  Synthetic
cagacucucggugaucu

SEQ ID NO: 12234 - RNA, 17 nt, Artificial Sequence
  Synthetic
ccuuuuuaacagacucu

SEQ ID NO: 12235 - RNA, 17 nt, Artificial Sequence
  Synthetic
gccccaucuggagcucu

SEQ ID NO: 12236 - RNA, 17 nt, Artificial Sequence
  Synthetic
cucuaccucgcgggucu

SEQ ID NO: 12237 - RNA, 17 nt, Artificial Sequence
  Synthetic
gccgauguacuuuuucu

SEQ ID NO: 12238 - RNA, 17 nt, Artificial Sequence
  Synthetic
acgugaaacccggaagu

SEQ ID NO: 12239 - RNA, 17 nt, Artificial Sequence
  Synthetic
gggcccggcggcguagu

SEQ ID NO: 12240 - RNA, 17 nt, Artificial Sequence
  Synthetic
cucguaguaguacacgu

SEQ ID NO: 12241 - RNA, 17 nt, Artificial Sequence
  Synthetic
accgccggcaggcacgu

SEQ ID NO: 12242 - RNA, 17 nt, Artificial Sequence
  Synthetic
gugaugacgguccccgu

SEQ ID NO: 12243 - RNA, 17 nt, Artificial Sequence
  Synthetic
guucagggcgacgccgu

SEQ ID NO: 12244 - RNA, 17 nt, Artificial Sequence
  Synthetic
gccgggcugacggccgu

SEQ ID NO: 12245 - RNA, 17 nt, Artificial Sequence
  Synthetic
uccagaaccacgggcgu

SEQ ID NO: 12246 - RNA, 17 nt, Artificial Sequence
  Synthetic
caggugcgccacugcgu

SEQ ID NO: 12247 - RNA, 17 nt, Artificial Sequence
  Synthetic
gcucgcagagaucucgu

SEQ ID NO: 12248 - RNA, 17 nt, Artificial Sequence
  Synthetic
guaauacaccgucaggu

SEQ ID NO: 12249 - RNA, 17 nt, Artificial Sequence
  Synthetic
cgccagcucguucaggu

SEQ ID NO: 12250 - RNA, 17 nt, Artificial Sequence
  Synthetic
ugagcuuguaugccggu

SEQ ID NO: 12251 - RNA, 17 nt, Artificial Sequence
  Synthetic
gcaggguucggggcggu

SEQ ID NO: 12252 - RNA, 17 nt, Artificial Sequence
  Synthetic
ucaagaaguacgagggu

SEQ ID NO: 12253 - RNA, 17 nt, Artificial Sequence
  Synthetic
gaugucccucuccgggu

SEQ ID NO: 12254 - RNA, 17 nt, Artificial Sequence
  Synthetic
cgcgccucccggggggu

SEQ ID NO: 12255 - RNA, 17 nt, Artificial Sequence
  Synthetic
caggauucccugcuggu

SEQ ID NO: 12256 - RNA, 17 nt, Artificial Sequence
  Synthetic
aauaaagcccuucuggu

SEQ ID NO: 12257 - RNA, 17 nt, Artificial Sequence
  Synthetic
cccgggggcgcgcaugu

SEQ ID NO: 12258 - RNA, 17 nt, Artificial Sequence
  Synthetic
cgaauucgagaugcugu

SEQ ID NO: 12259 - RNA, 17 nt, Artificial Sequence
  Synthetic
gggcguguuucgcgugu

SEQ ID NO: 12260 - RNA, 17 nt, Artificial Sequence
  Synthetic
guggggcgcggcauugu

SEQ ID NO: 12261 - RNA, 17 nt, Artificial Sequence
  Synthetic
gugggccaggcgcuugu

SEQ ID NO: 12262 - RNA, 17 nt, Artificial Sequence
  Synthetic
cgagagcuugaucuugu

SEQ ID NO: 12263 - RNA, 17 nt, Artificial Sequence
  Synthetic
gcugaagcacagguugu

SEQ ID NO: 12264 - RNA, 17 nt, Artificial Sequence
  Synthetic
cccggguucgucaccuu

SEQ ID NO: 12265 - RNA, 17 nt, Artificial Sequence
  Synthetic
gcugcggccggacgcuu

SEQ ID NO: 12266 - RNA, 17 nt, Artificial Sequence
  Synthetic
acagcacacgcccgcuu

SEQ ID NO: 12267 - RNA, 17 nt, Artificial Sequence
  Synthetic
guccuucaggacggcuu

SEQ ID NO: 12268 - RNA, 17 nt, Artificial Sequence
  Synthetic
cgggugucugcucaguu

SEQ ID NO: 12269 - RNA, 20 nt, Artificial Sequence
  Synthetic
ucaccgagagucuguuaaaa

SEQ ID NO: 12270 - RNA, 20 nt, Artificial Sequence
  Synthetic
ggggccguacuguuucacaa

SEQ ID NO: 12271 - RNA, 20 nt, Artificial Sequence
  Synthetic
cagggcgacgccgugggcaa

SEQ ID NO: 12272 - RNA, 20 nt, Artificial Sequence
  Synthetic
ggggguaagaugcucaucaa

SEQ ID NO: 12273 - RNA, 20 nt, Artificial Sequence
  Synthetic
gucagcuuggccagcaagaa

SEQ ID NO: 12274 - RNA, 20 nt, Artificial Sequence
  Synthetic
cugcgccuggccgaccagaa

SEQ ID NO: 12275 - RNA, 20 nt, Artificial Sequence
  Synthetic
cgggugcccggccaccggaa

SEQ ID NO: 12276 - RNA, 20 nt, Artificial Sequence
  Synthetic
gacggguacggccgcaugaa

SEQ ID NO: 12277 - RNA, 20 nt, Artificial Sequence
  Synthetic
ccgcgugccguaaacgugaa

SEQ ID NO: 12278 - RNA, 20 nt, Artificial Sequence
  Synthetic
cgcagcaagauaaaggugaa

SEQ ID NO: 12279 - RNA, 20 nt, Artificial Sequence
  Synthetic
ccagaagcgcagcaagauaa

SEQ ID NO: 12280 - RNA, 20 nt, Artificial Sequence
  Synthetic
cuuggcguuauucccaaaca

SEQ ID NO: 12281 - RNA, 20 nt, Artificial Sequence
  Synthetic
ccacggcgucgcccugaaca

SEQ ID NO: 12282 - RNA, 20 nt, Artificial Sequence
  Synthetic
cggggccguacuguuucaca

SEQ ID NO: 12283 - RNA, 20 nt, Artificial Sequence
  Synthetic
gcgcaucaucuacggggaca

SEQ ID NO: 12284 - RNA, 20 nt, Artificial Sequence
  Synthetic
caagcugacggacauuuaca

SEQ ID NO: 12285 - RNA, 20 nt, Artificial Sequence
  Synthetic
gcugucgaauuccagaacca

SEQ ID NO: 12286 - RNA, 20 nt, Artificial Sequence
  Synthetic
guaaaacagcaggucgacca

SEQ ID NO: 12287 - RNA, 20 nt, Artificial Sequence
  Synthetic
uuuauucugccggacaccca

SEQ ID NO: 12288 - RNA, 20 nt, Artificial Sequence
  Synthetic
gcucgccaucuugucgccca

SEQ ID NO: 12289 - RNA, 20 nt, Artificial Sequence
  Synthetic
cccgcauacgccauugccca

SEQ ID NO: 12290 - RNA, 20 nt, Artificial Sequence
  Synthetic
ccugaacgagcuggcggcca

SEQ ID NO: 12291 - RNA, 20 nt, Artificial Sequence
  Synthetic
cuucaggacggcuucggcca

SEQ ID NO: 12292 - RNA, 20 nt, Artificial Sequence
  Synthetic
cgugggguaccagggggcca

SEQ ID NO: 12293 - RNA, 20 nt, Artificial Sequence
  Synthetic
guuuaucaaccgcaccucca

SEQ ID NO: 12294 - RNA, 20 nt, Artificial Sequence
  Synthetic
aaacaggaggacgugcucca

SEQ ID NO: 12295 - RNA, 20 nt, Artificial Sequence
  Synthetic
ggguucacgggagugcagca

SEQ ID NO: 12296 - RNA, 20 nt, Artificial Sequence
  Synthetic
cugcugcuuguccaggagca

SEQ ID NO: 12297 - RNA, 20 nt, Artificial Sequence
  Synthetic
ccgcgcggcuccggaccgca

SEQ ID NO: 12298 - RNA, 20 nt, Artificial Sequence
  Synthetic
acgagaucucugcgagcgca

SEQ ID NO: 12299 - RNA, 20 nt, Artificial Sequence
  Synthetic
cgcgcccggggacucgcgca

SEQ ID NO: 12300 - RNA, 20 nt, Artificial Sequence
  Synthetic
cgagcggaucugcuuucgca

SEQ ID NO: 12301 - RNA, 20 nt, Artificial Sequence
  Synthetic
gucgcggcaacgugcaggca

SEQ ID NO: 12302 - RNA, 20 nt, Artificial Sequence
  Synthetic
caagauaaaggugaacggca

SEQ ID NO: 12303 - RNA, 20 nt, Artificial Sequence
  Synthetic
gcgcuuggccggggagggca

SEQ ID NO: 12304 - RNA, 20 nt, Artificial Sequence
  Synthetic
ggcgcaccuggaggcgggca

SEQ ID NO: 12305 - RNA, 20 nt, Artificial Sequence
  Synthetic
cgccugcagucccucgggca

SEQ ID NO: 12306 - RNA, 20 nt, Artificial Sequence
  Synthetic
gugcuucgauaucgaaugca

SEQ ID NO: 12307 - RNA, 20 nt, Artificial Sequence
  Synthetic
caagcagcaggccgccauca

SEQ ID NO: 12308 - RNA, 20 nt, Artificial Sequence
  Synthetic
cgcgcaggucccguccauca

SEQ ID NO: 12309 - RNA, 20 nt, Artificial Sequence
  Synthetic
cggggguaagaugcucauca

SEQ ID NO: 12310 - RNA, 20 nt, Artificial Sequence
  Synthetic
ugugcugugccgcggccuca

SEQ ID NO: 12311 - RNA, 20 nt, Artificial Sequence
  Synthetic
gacgguguauuacaagcuca

SEQ ID NO: 12312 - RNA, 20 nt, Artificial Sequence
  Synthetic
gcgacggcuguucuucguca

SEQ ID NO: 12313 - RNA, 20 nt, Artificial Sequence
  Synthetic
gaaacccggaagugggguca

SEQ ID NO: 12314 - RNA, 20 nt, Artificial Sequence
  Synthetic
ggcggcgugcgugacauuca

SEQ ID NO: 12315 - RNA, 20 nt, Artificial Sequence
  Synthetic
gaaguaauaguccguguuca

SEQ ID NO: 12316 - RNA, 20 nt, Artificial Sequence
  Synthetic
gacggccgugggcgacaaga

SEQ ID NO: 12317 - RNA, 20 nt, Artificial Sequence
  Synthetic
cgucagcuuggccagcaaga

SEQ ID NO: 12318 - RNA, 20 nt, Artificial Sequence
  Synthetic
cguccugaaggacaagaaga

SEQ ID NO: 12319 - RNA, 20 nt, Artificial Sequence
  Synthetic
gcugcgccuggccgaccaga

SEQ ID NO: 12320 - RNA, 20 nt, Artificial Sequence
  Synthetic
gacccgcgagguagaggaga

SEQ ID NO: 12321 - RNA, 20 nt, Artificial Sequence
  Synthetic
gcgcaucaccgacccggaga

SEQ ID NO: 12322 - RNA, 20 nt, Artificial Sequence
  Synthetic
cgcggcggccgcuccggaga

SEQ ID NO: 12323 - RNA, 20 nt, Artificial Sequence
  Synthetic
uguuccggcccgguuugaga

SEQ ID NO: 12324 - RNA, 20 nt, Artificial Sequence
  Synthetic
gaucugcuggccgucguaga

SEQ ID NO: 12325 - RNA, 20 nt, Artificial Sequence
  Synthetic
aucacccgcaccaucuacga

SEQ ID NO: 12326 - RNA, 20 nt, Artificial Sequence
  Synthetic
ccggccaucaagaaguacga

SEQ ID NO: 12327 - RNA, 20 nt, Artificial Sequence
  Synthetic
cuggcgcgaccccugcccga

SEQ ID NO: 12328 - RNA, 20 nt, Artificial Sequence
  Synthetic
gacgucgcuggaugucccga

SEQ ID NO: 12329 - RNA, 20 nt, Artificial Sequence
  Synthetic
uuugagacgguaccagccga

SEQ ID NO: 12330 - RNA, 20 nt, Artificial Sequence
  Synthetic
ccgggucggugaugcgccga

SEQ ID NO: 12331 - RNA, 20 nt, Artificial Sequence
  Synthetic
gagcagcaucucgcggccga

SEQ ID NO: 12332 - RNA, 20 nt, Artificial Sequence
  Synthetic
gugccugcacguugccgcga

SEQ ID NO: 12333 - RNA, 20 nt, Artificial Sequence
  Synthetic
aauacccgccaagcgcgcga

SEQ ID NO: 12334 - RNA, 20 nt, Artificial Sequence
  Synthetic
cccggggggucggcaggcga

SEQ ID NO: 12335 - RNA, 20 nt, Artificial Sequence
  Synthetic
agaucgaggugggggggcga

SEQ ID NO: 12336 - RNA, 20 nt, Artificial Sequence
  Synthetic
gucgcucaugccccccucga

SEQ ID NO: 12337 - RNA, 20 nt, Artificial Sequence
  Synthetic
aucggccaggagcuguucga

SEQ ID NO: 12338 - RNA, 20 nt, Artificial Sequence
  Synthetic
cuucuucuuguccuucagga

SEQ ID NO: 12339 - RNA, 20 nt, Artificial Sequence
  Synthetic
ccgaugggcgucuacgagga

SEQ ID NO: 12340 - RNA, 20 nt, Artificial Sequence
  Synthetic
cuccugggccugacuccgga

SEQ ID NO: 12341 - RNA, 20 nt, Artificial Sequence
  Synthetic
ggcggcgucuagcucgcgga

SEQ ID NO: 12342 - RNA, 20 nt, Artificial Sequence
  Synthetic
cgggggcgcuuggccgggga

SEQ ID NO: 12343 - RNA, 20 nt, Artificial Sequence
  Synthetic
auuuacaaggucccccugga

SEQ ID NO: 12344 - RNA, 20 nt, Artificial Sequence
  Synthetic
cuguuucacaagggucauga

SEQ ID NO: 12345 - RNA, 20 nt, Artificial Sequence
  Synthetic
caggcccaggagcgugauga

SEQ ID NO: 12346 - RNA, 20 nt, Artificial Sequence
  Synthetic
caagcgccuggcccaccuga

SEQ ID NO: 12347 - RNA, 20 nt, Artificial Sequence
  Synthetic
cuucagcacgcucucccuga

SEQ ID NO: 12348 - RNA, 20 nt, Artificial Sequence
  Synthetic
cguggccgaagccguccuga

SEQ ID NO: 12349 - RNA, 20 nt, Artificial Sequence
  Synthetic
cuucuugcuggccaagcuga

SEQ ID NO: 12350 - RNA, 20 nt, Artificial Sequence
  Synthetic
ccucacggccgccgggcuga

SEQ ID NO: 12351 - RNA, 20 nt, Artificial Sequence
  Synthetic
gacgguccccgucgguguga

SEQ ID NO: 12352 - RNA, 20 nt, Artificial Sequence
  Synthetic
cgaguuacacacgaccuuga

SEQ ID NO: 12353 - RNA, 20 nt, Artificial Sequence
  Synthetic
guacgggauccgguccuuga

SEQ ID NO: 12354 - RNA, 20 nt, Artificial Sequence
  Synthetic
cccacccucguacuucuuga

SEQ ID NO: 12355 - RNA, 20 nt, Artificial Sequence
  Synthetic
uagaugaugcgcauggaaua

SEQ ID NO: 12356 - RNA, 20 nt, Artificial Sequence
  Synthetic
ggcggugggugccggcgcua

SEQ ID NO: 12357 - RNA, 20 nt, Artificial Sequence
  Synthetic
augacccuugugaaacagua

SEQ ID NO: 12358 - RNA, 20 nt, Artificial Sequence
  Synthetic
aaggucccccuggacgggua

SEQ ID NO: 12359 - RNA, 20 nt, Artificial Sequence
  Synthetic
cgacgucgaguuuaacugua

SEQ ID NO: 12360 - RNA, 20 nt, Artificial Sequence
  Synthetic
gucguguguaacucggugua

SEQ ID NO: 12361 - RNA, 20 nt, Artificial Sequence
  Synthetic
ggacacccaggggcgauuua

SEQ ID NO: 12362 - RNA, 20 nt, Artificial Sequence
  Synthetic
cggguggccguucacguuua

SEQ ID NO: 12363 - RNA, 20 nt, Artificial Sequence
  Synthetic
ucuuggcguuauucccaaac

SEQ ID NO: 12364 - RNA, 20 nt, Artificial Sequence
  Synthetic
cggcugguaccgucucaaac

SEQ ID NO: 12365 - RNA, 20 nt, Artificial Sequence
  Synthetic
ucacgcacgccgcccccaac

SEQ ID NO: 12366 - RNA, 20 nt, Artificial Sequence
  Synthetic
cgggguuguccaggaugaac

SEQ ID NO: 12367 - RNA, 20 nt, Artificial Sequence
  Synthetic
cugucgaauuccagaaccac

SEQ ID NO: 12368 - RNA, 20 nt, Artificial Sequence
  Synthetic
gcaaagucgaacaccaccac

SEQ ID NO: 12369 - RNA, 20 nt, Artificial Sequence
  Synthetic
gccugacuccggaaggccac

SEQ ID NO: 12370 - RNA, 20 nt, Artificial Sequence
  Synthetic
gggagagcgugcugaagcac

SEQ ID NO: 12371 - RNA, 20 nt, Artificial Sequence
  Synthetic
ccgggcagaaguugucgcac

SEQ ID NO: 12372 - RNA, 20 nt, Artificial Sequence
  Synthetic
ggacaggucguagagcagac

SEQ ID NO: 12373 - RNA, 20 nt, Artificial Sequence
  Synthetic
ugaacaaggaggaggucgac

SEQ ID NO: 12374 - RNA, 20 nt, Artificial Sequence
  Synthetic
acaacaucaucaacuucgac

SEQ ID NO: 12375 - RNA, 20 nt, Artificial Sequence
  Synthetic
aggucccguccaucaaggac

SEQ ID NO: 12376 - RNA, 20 nt, Artificial Sequence
  Synthetic
ucagcauccuccugcgggac

SEQ ID NO: 12377 - RNA, 20 nt, Artificial Sequence
  Synthetic
ggauccgguccuugauggac

SEQ ID NO: 12378 - RNA, 20 nt, Artificial Sequence
  Synthetic
uuuacaaggucccccuggac

SEQ ID NO: 12379 - RNA, 20 nt, Artificial Sequence
  Synthetic
gcuccagggcggugguggac

SEQ ID NO: 12380 - RNA, 20 nt, Artificial Sequence
  Synthetic
uacggccccgaguucgugac

SEQ ID NO: 12381 - RNA, 20 nt, Artificial Sequence
  Synthetic
gaucggcgaguacugcauac

SEQ ID NO: 12382 - RNA, 20 nt, Artificial Sequence
  Synthetic
ggggggcaugagcgaccuac

SEQ ID NO: 12383 - RNA, 20 nt, Artificial Sequence
  Synthetic
ucugggccacgaucacguac

SEQ ID NO: 12384 - RNA, 20 nt, Artificial Sequence
  Synthetic
ccuggaugaugcugggguac

SEQ ID NO: 12385 - RNA, 20 nt, Artificial Sequence
  Synthetic
uggugaacaucgacauguac

SEQ ID NO: 12386 - RNA, 20 nt, Artificial Sequence
  Synthetic
ucguguguaacucgguguac

SEQ ID NO: 12387 - RNA, 20 nt, Artificial Sequence
  Synthetic
ggcugguaccgucucaaacc

SEQ ID NO: 12388 - RNA, 20 nt, Artificial Sequence
  Synthetic
uaacuguacggcggacaacc

SEQ ID NO: 12389 - RNA, 20 nt, Artificial Sequence
  Synthetic
gggguuguccaggaugaacc

SEQ ID NO: 12390 - RNA, 20 nt, Artificial Sequence
  Synthetic
guggggucgacgccaccacc

SEQ ID NO: 12391 - RNA, 20 nt, Artificial Sequence
  Synthetic
ccugacuccggaaggccacc

SEQ ID NO: 12392 - RNA, 20 nt, Artificial Sequence
  Synthetic
cguaaacgugaacggccacc

SEQ ID NO: 12393 - RNA, 20 nt, Artificial Sequence
  Synthetic
cguaaaacagcaggucgacc

SEQ ID NO: 12394 - RNA, 20 nt, Artificial Sequence
  Synthetic
gacaggauaucuggaugacc

SEQ ID NO: 12395 - RNA, 20 nt, Artificial Sequence
  Synthetic
acggccccgaguucgugacc

SEQ ID NO: 12396 - RNA, 20 nt, Artificial Sequence
  Synthetic
gaaguugaugauguuguacc

SEQ ID NO: 12397 - RNA, 20 nt, Artificial Sequence
  Synthetic
cgguucauccuggacaaccc

SEQ ID NO: 12398 - RNA, 20 nt, Artificial Sequence
  Synthetic
cagccgaaggugacgaaccc

SEQ ID NO: 12399 - RNA, 20 nt, Artificial Sequence
  Synthetic
ggaaguggggucaaggaccc

SEQ ID NO: 12400 - RNA, 20 nt, Artificial Sequence
  Synthetic
gguucauccuggacaacccc

SEQ ID NO: 12401 - RNA, 20 nt, Artificial Sequence
  Synthetic
ucccgaaguguggcaccccc

SEQ ID NO: 12402 - RNA, 20 nt, Artificial Sequence
  Synthetic
acgcuugggcgccucccccc

SEQ ID NO: 12403 - RNA, 20 nt, Artificial Sequence
  Synthetic
cggccgacaugcgcgccccc

SEQ ID NO: 12404 - RNA, 20 nt, Artificial Sequence
  Synthetic
ggucaaggacccuggccccc

SEQ ID NO: 12405 - RNA, 20 nt, Artificial Sequence
  Synthetic
ggacauuuacaagguccccc

SEQ ID NO: 12406 - RNA, 20 nt, Artificial Sequence
  Synthetic
gcggccgacaugcgcgcccc

SEQ ID NO: 12407 - RNA, 20 nt, Artificial Sequence
  Synthetic
cggcgccccuaaaucgcccc

SEQ ID NO: 12408 - RNA, 20 nt, Artificial Sequence
  Synthetic
cacgggcgugggcaggcccc

SEQ ID NO: 12409 - RNA, 20 nt, Artificial Sequence
  Synthetic
gcggcccugcgcgagucccc

SEQ ID NO: 12410 - RNA, 20 nt, Artificial Sequence
  Synthetic
caaccgcaccuccagggccc

SEQ ID NO: 12411 - RNA, 20 nt, Artificial Sequence
  Synthetic
ccccgcggcccugcccuccc

SEQ ID NO: 12412 - RNA, 20 nt, Artificial Sequence
  Synthetic
uggccgcuccucguccuccc

SEQ ID NO: 12413 - RNA, 20 nt, Artificial Sequence
  Synthetic
cgcggcccugcgcgaguccc

SEQ ID NO: 12414 - RNA, 20 nt, Artificial Sequence
  Synthetic
gucgcccacggccgucagcc

SEQ ID NO: 12415 - RNA, 20 nt, Artificial Sequence
  Synthetic
uccccgccuacuacgccgcc

SEQ ID NO: 12416 - RNA, 20 nt, Artificial Sequence
  Synthetic
gccgcggccucacggccgcc

SEQ ID NO: 12417 - RNA, 20 nt, Artificial Sequence
  Synthetic
cgcguacaccaacaagcgcc

SEQ ID NO: 12418 - RNA, 20 nt, Artificial Sequence
  Synthetic
cuuuacgugccugcugcgcc

SEQ ID NO: 12419 - RNA, 20 nt, Artificial Sequence
  Synthetic
guacggccgcaugaacggcc

SEQ ID NO: 12420 - RNA, 20 nt, Artificial Sequence
  Synthetic
gcuagcguguuguuccggcc

SEQ ID NO: 12421 - RNA, 20 nt, Artificial Sequence
  Synthetic
uaaagcccuucuggucggcc

SEQ ID NO: 12422 - RNA, 20 nt, Artificial Sequence
  Synthetic
caccccgcguugcgcgggcc

SEQ ID NO: 12423 - RNA, 20 nt, Artificial Sequence
  Synthetic
acgugggguaccagggggcc

SEQ ID NO: 12424 - RNA, 20 nt, Artificial Sequence
  Synthetic
aauacaccgucaggugggcc

SEQ ID NO: 12425 - RNA, 20 nt, Artificial Sequence
  Synthetic
ugaagcacagguugugggcc

SEQ ID NO: 12426 - RNA, 20 nt, Artificial Sequence
  Synthetic
ucaugccccccucgauggcc

SEQ ID NO: 12427 - RNA, 20 nt, Artificial Sequence
  Synthetic
ccucguacuucuugauggcc

SEQ ID NO: 12428 - RNA, 20 nt, Artificial Sequence
  Synthetic
agcuggccuuuccgguggcc

SEQ ID NO: 12429 - RNA, 20 nt, Artificial Sequence
  Synthetic
ccugugcgacaacuucugcc

SEQ ID NO: 12430 - RNA, 20 nt, Artificial Sequence
  Synthetic
gaccagguccuccgggugcc

SEQ ID NO: 12431 - RNA, 20 nt, Artificial Sequence
  Synthetic
cgacccggagagggacaucc

SEQ ID NO: 12432 - RNA, 20 nt, Artificial Sequence
  Synthetic
ccuguaccccagcaucaucc

SEQ ID NO: 12433 - RNA, 20 nt, Artificial Sequence
  Synthetic
cgccaccacccgguucaucc

SEQ ID NO: 12434 - RNA, 20 nt, Artificial Sequence
  Synthetic
cguuuaucaaccgcaccucc

SEQ ID NO: 12435 - RNA, 20 nt, Artificial Sequence
  Synthetic
gguaguccuugcccgccucc

SEQ ID NO: 12436 - RNA, 20 nt, Artificial Sequence
  Synthetic
cuggccgcuccucguccucc

SEQ ID NO: 12437 - RNA, 20 nt, Artificial Sequence
  Synthetic
ucuggaugaccagguccucc

SEQ ID NO: 12438 - RNA, 20 nt, Artificial Sequence
  Synthetic
ggcggccuucgaacagcucc

SEQ ID NO: 12439 - RNA, 20 nt, Artificial Sequence
  Synthetic
ggggaccgucaucacgcucc

SEQ ID NO: 12440 - RNA, 20 nt, Artificial Sequence
  Synthetic
aaaacaggaggacgugcucc

SEQ ID NO: 12441 - RNA, 20 nt, Artificial Sequence
  Synthetic
ccccgaggaggccgugcucc

SEQ ID NO: 12442 - RNA, 20 nt, Artificial Sequence
  Synthetic
gcccccccaccucgaucucc

SEQ ID NO: 12443 - RNA, 20 nt, Artificial Sequence
  Synthetic
aguccuggaugucccucucc

SEQ ID NO: 12444 - RNA, 20 nt, Artificial Sequence
  Synthetic
cggcggugaggacaaagucc

SEQ ID NO: 12445 - RNA, 20 nt, Artificial Sequence
  Synthetic
ugacgaacccgggguugucc

SEQ ID NO: 12446 - RNA, 20 nt, Artificial Sequence
  Synthetic
ggguccuugaccccacuucc

SEQ ID NO: 12447 - RNA, 20 nt, Artificial Sequence
  Synthetic
accgcgucuacguccgaagc

SEQ ID NO: 12448 - RNA, 20 nt, Artificial Sequence
  Synthetic
gcaaaaacuuaaaaaacagc

SEQ ID NO: 12449 - RNA, 20 nt, Artificial Sequence
  Synthetic
cgguaucgucguaaaacagc

SEQ ID NO: 12450 - RNA, 20 nt, Artificial Sequence
  Synthetic
gaacaacacgcuagcccagc

SEQ ID NO: 12451 - RNA, 20 nt, Artificial Sequence
  Synthetic
cgugcuccuggacaagcagc

SEQ ID NO: 12452 - RNA, 20 nt, Artificial Sequence
  Synthetic
ucuggucggccaggcgcagc

SEQ ID NO: 12453 - RNA, 20 nt, Artificial Sequence
  Synthetic
uagacgcgguaaaacagagc

SEQ ID NO: 12454 - RNA, 20 nt, Artificial Sequence
  Synthetic
cgaaucccaccugaacgagc

SEQ ID NO: 12455 - RNA, 20 nt, Artificial Sequence
  Synthetic
caagcugcugguguccgagc

SEQ ID NO: 12456 - RNA, 20 nt, Artificial Sequence
  Synthetic
gccgcgcggcuccggaccgc

SEQ ID NO: 12457 - RNA, 20 nt, Artificial Sequence
  Synthetic
auccccgccuacuacgccgc

SEQ ID NO: 12458 - RNA, 20 nt, Artificial Sequence
  Synthetic
ugccgcggccucacggccgc

SEQ ID NO: 12459 - RNA, 20 nt, Artificial Sequence
  Synthetic
ccgaaggccaucggggccgc

SEQ ID NO: 12460 - RNA, 20 nt, Artificial Sequence
  Synthetic
cgcgccagccacuccuccgc

SEQ ID NO: 12461 - RNA, 20 nt, Artificial Sequence
  Synthetic
aguuuccuccgccguagcgc

SEQ ID NO: 12462 - RNA, 20 nt, Artificial Sequence
  Synthetic
gcgaguacguccacgcgcgc

SEQ ID NO: 12463 - RNA, 20 nt, Artificial Sequence
  Synthetic
gcuuguugguguacgcgcgc

SEQ ID NO: 12464 - RNA, 20 nt, Artificial Sequence
  Synthetic
gcucauggcccgccgcgcgc

SEQ ID NO: 12465 - RNA, 20 nt, Artificial Sequence
  Synthetic
acgcgcccggggacucgcgc

SEQ ID NO: 12466 - RNA, 20 nt, Artificial Sequence
  Synthetic
ccgaucaccccgcguugcgc

SEQ ID NO: 12467 - RNA, 20 nt, Artificial Sequence
  Synthetic
gcgcgcguggacguacucgc

SEQ ID NO: 12468 - RNA, 20 nt, Artificial Sequence
  Synthetic
gaccgucuccucuaccucgc

SEQ ID NO: 12469 - RNA, 20 nt, Artificial Sequence
  Synthetic
acaguuaaacucgacgucgc

SEQ ID NO: 12470 - RNA, 20 nt, Artificial Sequence
  Synthetic
gaugaugcugggguacaggc

SEQ ID NO: 12471 - RNA, 20 nt, Artificial Sequence
  Synthetic
gcaguggcgcaccuggaggc

SEQ ID NO: 12472 - RNA, 20 nt, Artificial Sequence
  Synthetic
aggccaucggggccgccggc

SEQ ID NO: 12473 - RNA, 20 nt, Artificial Sequence
  Synthetic
ggacgggaccugcgcgcggc

SEQ ID NO: 12474 - RNA, 20 nt, Artificial Sequence
  Synthetic
agaggagacggucgcgcggc

SEQ ID NO: 12475 - RNA, 20 nt, Artificial Sequence
  Synthetic
ucguccucccgggcugcggc

SEQ ID NO: 12476 - RNA, 20 nt, Artificial Sequence
  Synthetic
gcgccucccggggggucggc

SEQ ID NO: 12477 - RNA, 20 nt, Artificial Sequence
  Synthetic
ccggguucgucaccuucggc

SEQ ID NO: 12478 - RNA, 20 nt, Artificial Sequence
  Synthetic
ggcgcuuggccggggagggc

SEQ ID NO: 12479 - RNA, 20 nt, Artificial Sequence
  Synthetic
ccagaaccacgggcgugggc

SEQ ID NO: 12480 - RNA, 20 nt, Artificial Sequence
  Synthetic
cccucguacuucuugauggc

SEQ ID NO: 12481 - RNA, 20 nt, Artificial Sequence
  Synthetic
gcgccccgcggaggaguggc

SEQ ID NO: 12482 - RNA, 20 nt, Artificial Sequence
  Synthetic
gagcuggccuuuccgguggc

SEQ ID NO: 12483 - RNA, 20 nt, Artificial Sequence
  Synthetic
ucggccgucgcgcgcuuggc

SEQ ID NO: 12484 - RNA, 20 nt, Artificial Sequence
  Synthetic
ccgugggcaauggcguaugc

SEQ ID NO: 12485 - RNA, 20 nt, Artificial Sequence
  Synthetic
aagcacaugagcuuguaugc

SEQ ID NO: 12486 - RNA, 20 nt, Artificial Sequence
  Synthetic
accccugcccgagggacugc

SEQ ID NO: 12487 - RNA, 20 nt, Artificial Sequence
  Synthetic
cugcauacaggauucccugc

SEQ ID NO: 12488 - RNA, 20 nt, Artificial Sequence
  Synthetic
cugguaccccacgugccugc

SEQ ID NO: 12489 - RNA, 20 nt, Artificial Sequence
  Synthetic
ccuccucagcauccuccugc

SEQ ID NO: 12490 - RNA, 20 nt, Artificial Sequence
  Synthetic
guccaagccccgcaagcugc

SEQ ID NO: 12491 - RNA, 20 nt, Artificial Sequence
  Synthetic
acguaaagacgcggaucugc

SEQ ID NO: 12492 - RNA, 20 nt, Artificial Sequence
  Synthetic
ccagaagggcuuuauucugc

SEQ ID NO: 12493 - RNA, 20 nt, Artificial Sequence
  Synthetic
ucaccgucgcggcaacgugc

SEQ ID NO: 12494 - RNA, 20 nt, Artificial Sequence
  Synthetic
ggguucggggcggugggugc

SEQ ID NO: 12495 - RNA, 20 nt, Artificial Sequence
  Synthetic
cuggccgucguagauggugc

SEQ ID NO: 12496 - RNA, 20 nt, Artificial Sequence
  Synthetic
cucggacaccagcagcuugc

SEQ ID NO: 12497 - RNA, 20 nt, Artificial Sequence
  Synthetic
cuucgacuggcccuucuugc

SEQ ID NO: 12498 - RNA, 20 nt, Artificial Sequence
  Synthetic
uggaugucccgaaggccauc

SEQ ID NO: 12499 - RNA, 20 nt, Artificial Sequence
  Synthetic
ccacgaucacguacgggauc

SEQ ID NO: 12500 - RNA, 20 nt, Artificial Sequence
  Synthetic
gcucaucaagggcguggauc

SEQ ID NO: 12501 - RNA, 20 nt, Artificial Sequence
  Synthetic
cguagagcagacaggauauc

SEQ ID NO: 12502 - RNA, 20 nt, Artificial Sequence
  Synthetic
uuguacccggucacgaacuc

SEQ ID NO: 12503 - RNA, 20 nt, Artificial Sequence
  Synthetic
gcggucucccgcgcgcccuc

SEQ ID NO: 12504 - RNA, 20 nt, Artificial Sequence
  Synthetic
ccgaacgccugcagucccuc

SEQ ID NO: 12505 - RNA, 20 nt, Artificial Sequence
  Synthetic
uccaggagcacggccuccuc

SEQ ID NO: 12506 - RNA, 20 nt, Artificial Sequence
  Synthetic
ucguccucccccuccuccuc

SEQ ID NO: 12507 - RNA, 20 nt, Artificial Sequence
  Synthetic
aucuggaugaccagguccuc

SEQ ID NO: 12508 - RNA, 20 nt, Artificial Sequence
  Synthetic
cggggaugucgcgauagcuc

SEQ ID NO: 12509 - RNA, 20 nt, Artificial Sequence
  Synthetic
acgacguggccgcgcggcuc

SEQ ID NO: 12510 - RNA, 20 nt, Artificial Sequence
  Synthetic
ugcgcuucuggaaguggcuc

SEQ ID NO: 12511 - RNA, 20 nt, Artificial Sequence
  Synthetic
aaguccuggaugucccucuc

SEQ ID NO: 12512 - RNA, 20 nt, Artificial Sequence
  Synthetic
cccgguggccuuccggaguc

SEQ ID NO: 12513 - RNA, 20 nt, Artificial Sequence
  Synthetic
ugagcuuguaauacaccguc

SEQ ID NO: 12514 - RNA, 20 nt, Artificial Sequence
  Synthetic
gggggaggcgcccaagcguc

SEQ ID NO: 12515 - RNA, 20 nt, Artificial Sequence
  Synthetic
ucuccucuaccucgcggguc

SEQ ID NO: 12516 - RNA, 20 nt, Artificial Sequence
  Synthetic
cuaaaucgccccuggguguc

SEQ ID NO: 12517 - RNA, 20 nt, Artificial Sequence
  Synthetic
aggguccuugaccccacuuc

SEQ ID NO: 12518 - RNA, 20 nt, Artificial Sequence
  Synthetic
ccggcagaauaaagcccuuc

SEQ ID NO: 12519 - RNA, 20 nt, Artificial Sequence
  Synthetic
cggcggccccgauggccuuc

SEQ ID NO: 12520 - RNA, 20 nt, Artificial Sequence
  Synthetic
gguccuucuucuuguccuuc

SEQ ID NO: 12521 - RNA, 20 nt, Artificial Sequence
  Synthetic
ccgagggacugcaggcguuc

SEQ ID NO: 12522 - RNA, 20 nt, Artificial Sequence
  Synthetic
cccuggccgccagcucguuc

SEQ ID NO: 12523 - RNA, 20 nt, Artificial Sequence
  Synthetic
ggcuccggaccgcaggguuc

SEQ ID NO: 12524 - RNA, 20 nt, Artificial Sequence
  Synthetic
agaaguaauaguccguguuc

SEQ ID NO: 12525 - RNA, 20 nt, Artificial Sequence
  Synthetic
gcugggcuagcguguuguuc

SEQ ID NO: 12526 - RNA, 20 nt, Artificial Sequence
  Synthetic
ggaggacgagcuggccuuuc

SEQ ID NO: 12527 - RNA, 20 nt, Artificial Sequence
  Synthetic
uaccgcgucuacguccgaag

SEQ ID NO: 12528 - RNA, 20 nt, Artificial Sequence
  Synthetic
ccaccaccuccgccucgaag

SEQ ID NO: 12529 - RNA, 20 nt, Artificial Sequence
  Synthetic
ucuugcugcgcuucuggaag

SEQ ID NO: 12530 - RNA, 20 nt, Artificial Sequence
  Synthetic
gcaggcacgugggguaccag

SEQ ID NO: 12531 - RNA, 20 nt, Artificial Sequence
  Synthetic
gcuagacgccgccgccccag

SEQ ID NO: 12532 - RNA, 20 nt, Artificial Sequence
  Synthetic
cugaacgagcuggcggccag

SEQ ID NO: 12533 - RNA, 20 nt, Artificial Sequence
  Synthetic
cucccugagggccgacgcag

SEQ ID NO: 12534 - RNA, 20 nt, Artificial Sequence
  Synthetic
gccugcagucccucgggcag

SEQ ID NO: 12535 - RNA, 20 nt, Artificial Sequence
  Synthetic
ugcucuggggaauccgcgag

SEQ ID NO: 12536 - RNA, 20 nt, Artificial Sequence
  Synthetic
cgacgauaccgucuccggag

SEQ ID NO: 12537 - RNA, 20 nt, Artificial Sequence
  Synthetic
gacacccaggggcgauuuag

SEQ ID NO: 12538 - RNA, 20 nt, Artificial Sequence
  Synthetic
cgcggggcgcucggcuaacg

SEQ ID NO: 12539 - RNA, 20 nt, Artificial Sequence
  Synthetic
caaagucgaacaccaccacg

SEQ ID NO: 12540 - RNA, 20 nt, Artificial Sequence
  Synthetic
ccguucacguuuacggcacg

SEQ ID NO: 12541 - RNA, 20 nt, Artificial Sequence
  Synthetic
gcagcaggcacguaaagacg

SEQ ID NO: 12542 - RNA, 20 nt, Artificial Sequence
  Synthetic
gcccgcuucggacguagacg

SEQ ID NO: 12543 - RNA, 20 nt, Artificial Sequence
  Synthetic
guggcaccccccggacgacg

SEQ ID NO: 12544 - RNA, 20 nt, Artificial Sequence
  Synthetic
uggacgccaucacaccgacg

SEQ ID NO: 12545 - RNA, 20 nt, Artificial Sequence
  Synthetic
uuccaugcgcaucaucuacg

SEQ ID NO: 12546 - RNA, 20 nt, Artificial Sequence
  Synthetic
guacaucggcgucaucuacg

SEQ ID NO: 12547 - RNA, 20 nt, Artificial Sequence
  Synthetic
ugcgccgaugggcgucuacg

SEQ ID NO: 12548 - RNA, 20 nt, Artificial Sequence
  Synthetic
cccggccaucaagaaguacg

SEQ ID NO: 12549 - RNA, 20 nt, Artificial Sequence
  Synthetic
agccgaaggugacgaacccg

SEQ ID NO: 12550 - RNA, 20 nt, Artificial Sequence
  Synthetic
cggguuucacgugaaccccg

SEQ ID NO: 12551 - RNA, 20 nt, Artificial Sequence
  Synthetic
caggggccugcccacgcccg

SEQ ID NO: 12552 - RNA, 20 nt, Artificial Sequence
  Synthetic
ugcgcauggaauagggcccg

SEQ ID NO: 12553 - RNA, 20 nt, Artificial Sequence
  Synthetic
gcaggcgacggcgucucccg

SEQ ID NO: 12554 - RNA, 20 nt, Artificial Sequence
  Synthetic
gagcuacaagcucaacgccg

SEQ ID NO: 12555 - RNA, 20 nt, Artificial Sequence
  Synthetic
ccguguucagggcgacgccg

SEQ ID NO: 12556 - RNA, 20 nt, Artificial Sequence
  Synthetic
gcccggcggccgugaggccg

SEQ ID NO: 12557 - RNA, 20 nt, Artificial Sequence
  Synthetic
uacggccgcaugaacggccg

SEQ ID NO: 12558 - RNA, 20 nt, Artificial Sequence
  Synthetic
ggccgccgggcugacggccg

SEQ ID NO: 12559 - RNA, 20 nt, Artificial Sequence
  Synthetic
cggggacucgcgcagggccg

SEQ ID NO: 12560 - RNA, 20 nt, Artificial Sequence
  Synthetic
ucucugcgagcgcauggccg

SEQ ID NO: 12561 - RNA, 20 nt, Artificial Sequence
  Synthetic
gcugguguccgagcuggccg

SEQ ID NO: 12562 - RNA, 20 nt, Artificial Sequence
  Synthetic
uccaucuuugugcugugccg

SEQ ID NO: 12563 - RNA, 20 nt, Artificial Sequence
  Synthetic
gucguuccgcggcaucuccg

SEQ ID NO: 12564 - RNA, 20 nt, Artificial Sequence
  Synthetic
uccccgggcgcgucguuccg

SEQ ID NO: 12565 - RNA, 20 nt, Artificial Sequence
  Synthetic
agacgcgguaaaacagagcg

SEQ ID NO: 12566 - RNA, 20 nt, Artificial Sequence
  Synthetic
gaucguggcccagacccgcg

SEQ ID NO: 12567 - RNA, 20 nt, Artificial Sequence
  Synthetic
cccugcgguccggagccgcg

SEQ ID NO: 12568 - RNA, 20 nt, Artificial Sequence
  Synthetic
ccccggacgacguggccgcg

SEQ ID NO: 12569 - RNA, 20 nt, Artificial Sequence
  Synthetic
gcgccagccacuccuccgcg

SEQ ID NO: 12570 - RNA, 20 nt, Artificial Sequence
  Synthetic
cgcuuguugguguacgcgcg

SEQ ID NO: 12571 - RNA, 20 nt, Artificial Sequence
  Synthetic
ugauggacgggaccugcgcg

SEQ ID NO: 12572 - RNA, 20 nt, Artificial Sequence
  Synthetic
agguagaggagacggucgcg

SEQ ID NO: 12573 - RNA, 20 nt, Artificial Sequence
  Synthetic
gcccggcggcguaguaggcg

SEQ ID NO: 12574 - RNA, 20 nt, Artificial Sequence
  Synthetic
uaagaugcucaucaagggcg

SEQ ID NO: 12575 - RNA, 20 nt, Artificial Sequence
  Synthetic
gaauuccagaaccacgggcg

SEQ ID NO: 12576 - RNA, 20 nt, Artificial Sequence
  Synthetic
cgcagagaucucguggggcg

SEQ ID NO: 12577 - RNA, 20 nt, Artificial Sequence
  Synthetic
ucggacaccagcagcuugcg

SEQ ID NO: 12578 - RNA, 20 nt, Artificial Sequence
  Synthetic
gccgaucaccccgcguugcg

SEQ ID NO: 12579 - RNA, 20 nt, Artificial Sequence
  Synthetic
ggaugucccgaaggccaucg

SEQ ID NO: 12580 - RNA, 20 nt, Artificial Sequence
  Synthetic
caaggacuaccuggagaucg

SEQ ID NO: 12581 - RNA, 20 nt, Artificial Sequence
  Synthetic
ccggaucccguacgugaucg

SEQ ID NO: 12582 - RNA, 20 nt, Artificial Sequence
  Synthetic
uguacccggucacgaacucg

SEQ ID NO: 12583 - RNA, 20 nt, Artificial Sequence
  Synthetic
agcgcgcguggacguacucg

SEQ ID NO: 12584 - RNA, 20 nt, Artificial Sequence
  Synthetic
cgaccgucuccucuaccucg

SEQ ID NO: 12585 - RNA, 20 nt, Artificial Sequence
  Synthetic
ccaggagcacggccuccucg

SEQ ID NO: 12586 - RNA, 20 nt, Artificial Sequence
  Synthetic
ugcgaaagcagauccgcucg

SEQ ID NO: 12587 - RNA, 20 nt, Artificial Sequence
  Synthetic
gggucgcgagcagcaucucg

SEQ ID NO: 12588 - RNA, 20 nt, Artificial Sequence
  Synthetic
gccgauggucgucaccgucg

SEQ ID NO: 12589 - RNA, 20 nt, Artificial Sequence
  Synthetic
caucuccgcggaccacuucg

SEQ ID NO: 12590 - RNA, 20 nt, Artificial Sequence
  Synthetic
cgagggacugcaggcguucg

SEQ ID NO: 12591 - RNA, 20 nt, Artificial Sequence
  Synthetic
gcuccggaccgcaggguucg

SEQ ID NO: 12592 - RNA, 20 nt, Artificial Sequence
  Synthetic
caggcacgugggguaccagg

SEQ ID NO: 12593 - RNA, 20 nt, Artificial Sequence
  Synthetic
ugcggccguacccguccagg

SEQ ID NO: 12594 - RNA, 20 nt, Artificial Sequence
  Synthetic
uggcgagccagucccgcagg

SEQ ID NO: 12595 - RNA, 20 nt, Artificial Sequence
  Synthetic
gcuuguaauacaccgucagg

SEQ ID NO: 12596 - RNA, 20 nt, Artificial Sequence
  Synthetic
uccccagagcagccccgagg

SEQ ID NO: 12597 - RNA, 20 nt, Artificial Sequence
  Synthetic
ggacaaccuggccaucgagg

SEQ ID NO: 12598 - RNA, 20 nt, Artificial Sequence
  Synthetic
cuuuuacaugaacaaggagg

SEQ ID NO: 12599 - RNA, 20 nt, Artificial Sequence
  Synthetic
ccuggccgauuucccggagg

SEQ ID NO: 12600 - RNA, 20 nt, Artificial Sequence
  Synthetic
ggaccacuucgaggcggagg

SEQ ID NO: 12601 - RNA, 20 nt, Artificial Sequence
  Synthetic
cgcaguggcgcaccuggagg

SEQ ID NO: 12602 - RNA, 20 nt, Artificial Sequence
  Synthetic
cccgcaggaggaugcugagg

SEQ ID NO: 12603 - RNA, 20 nt, Artificial Sequence
  Synthetic
uacaucggcgucaucuacgg

SEQ ID NO: 12604 - RNA, 20 nt, Artificial Sequence
  Synthetic
cgucgaguuuaacuguacgg

SEQ ID NO: 12605 - RNA, 20 nt, Artificial Sequence
  Synthetic
aaacgugaacggccacccgg

SEQ ID NO: 12606 - RNA, 20 nt, Artificial Sequence
  Synthetic
uccgguggccgggcacccgg

SEQ ID NO: 12607 - RNA, 20 nt, Artificial Sequence
  Synthetic
gcccacggccgucagcccgg

SEQ ID NO: 12608 - RNA, 20 nt, Artificial Sequence
  Synthetic
gcgcauggaauagggcccgg

SEQ ID NO: 12609 - RNA, 20 nt, Artificial Sequence
  Synthetic
cccgcguugcgcgggcccgg

SEQ ID NO: 12610 - RNA, 20 nt, Artificial Sequence
  Synthetic
ggcuuggacgcgccucccgg

SEQ ID NO: 12611 - RNA, 20 nt, Artificial Sequence
  Synthetic
caggcgacggcgucucccgg

SEQ ID NO: 12612 - RNA, 20 nt, Artificial Sequence
  Synthetic
gcuccuggccgauuucccgg

SEQ ID NO: 12613 - RNA, 20 nt, Artificial Sequence
  Synthetic
caacacgcuagcccagccgg

SEQ ID NO: 12614 - RNA, 20 nt, Artificial Sequence
  Synthetic
guaccccacgugccugccgg

SEQ ID NO: 12615 - RNA, 20 nt, Artificial Sequence
  Synthetic
cgcgcggccacgucguccgg

SEQ ID NO: 12616 - RNA, 20 nt, Artificial Sequence
  Synthetic
ggacgagcuggccuuuccgg

SEQ ID NO: 12617 - RNA, 20 nt, Artificial Sequence
  Synthetic
ggggcgcucggcuaacgcgg

SEQ ID NO: 12618 - RNA, 20 nt, Artificial Sequence
  Synthetic
uggacgggaccugcgcgcgg

SEQ ID NO: 12619 - RNA, 20 nt, Artificial Sequence
  Synthetic
cggcggcgucuagcucgcgg

SEQ ID NO: 12620 - RNA, 20 nt, Artificial Sequence
  Synthetic
cgcggaccacuucgaggcgg

SEQ ID NO: 12621 - RNA, 20 nt, Artificial Sequence
  Synthetic
gaggacgugcuccagggcgg

SEQ ID NO: 12622 - RNA, 20 nt, Artificial Sequence
  Synthetic
gaccgcaggguucggggcgg

SEQ ID NO: 12623 - RNA, 20 nt, Artificial Sequence
  Synthetic
gggcucguccccuggggcgg

SEQ ID NO: 12624 - RNA, 20 nt, Artificial Sequence
  Synthetic
cgggugucugcucaguucgg

SEQ ID NO: 12625 - RNA, 20 nt, Artificial Sequence
  Synthetic
caggaggacgugcuccaggg

SEQ ID NO: 12626 - RNA, 20 nt, Artificial Sequence
  Synthetic
gacaaccuggccaucgaggg

SEQ ID NO: 12627 - RNA, 20 nt, Artificial Sequence
  Synthetic
ggcgucuagcucgcggaggg

SEQ ID NO: 12628 - RNA, 20 nt, Artificial Sequence
  Synthetic
guuguccaggaugaaccggg

SEQ ID NO: 12629 - RNA, 20 nt, Artificial Sequence
  Synthetic
gacuccggaaggccaccggg

SEQ ID NO: 12630 - RNA, 20 nt, Artificial Sequence
  Synthetic
ucgccugccgaccccccggg

SEQ ID NO: 12631 - RNA, 20 nt, Artificial Sequence
  Synthetic
gcguccggccgcagcccggg

SEQ ID NO: 12632 - RNA, 20 nt, Artificial Sequence
  Synthetic
gcuuggacgcgccucccggg

SEQ ID NO: 12633 - RNA, 20 nt, Artificial Sequence
  Synthetic
gcgcggccacgucguccggg

SEQ ID NO: 12634 - RNA, 20 nt, Artificial Sequence
  Synthetic
ccgggggcgcuuggccgggg

SEQ ID NO: 12635 - RNA, 20 nt, Artificial Sequence
  Synthetic
cguucaggugggauucgggg

SEQ ID NO: 12636 - RNA, 20 nt, Artificial Sequence
  Synthetic
ccggaccgcaggguucgggg

SEQ ID NO: 12637 - RNA, 20 nt, Artificial Sequence
  Synthetic
auuuaggggcgccggggggg

SEQ ID NO: 12638 - RNA, 20 nt, Artificial Sequence
  Synthetic
cgaaugcaaggcgggggggg

SEQ ID NO: 12639 - RNA, 20 nt, Artificial Sequence
  Synthetic
cuucucccaccuguuggggg

SEQ ID NO: 12640 - RNA, 20 nt, Artificial Sequence
  Synthetic
ggcgggcucguccccugggg

SEQ ID NO: 12641 - RNA, 20 nt, Artificial Sequence
  Synthetic
accuggagaucgaggugggg

SEQ ID NO: 12642 - RNA, 20 nt, Artificial Sequence
  Synthetic
ucgcacucgaguuugauggg

SEQ ID NO: 12643 - RNA, 20 nt, Artificial Sequence
  Synthetic
guacguccacgcgcgcuggg

SEQ ID NO: 12644 - RNA, 20 nt, Artificial Sequence
  Synthetic
uaccuggagaucgagguggg

SEQ ID NO: 12645 - RNA, 20 nt, Artificial Sequence
  Synthetic
guuacacacgaccuugaugg

SEQ ID NO: 12646 - RNA, 20 nt, Artificial Sequence
  Synthetic
uucgcacucgaguuugaugg

SEQ ID NO: 12647 - RNA, 20 nt, Artificial Sequence
  Synthetic
cgacgcaguggcgcaccugg

SEQ ID NO: 12648 - RNA, 20 nt, Artificial Sequence
  Synthetic
caggucgaccagggcccugg

SEQ ID NO: 12649 - RNA, 20 nt, Artificial Sequence
  Synthetic
aucccaccugaacgagcugg

SEQ ID NO: 12650 - RNA, 20 nt, Artificial Sequence
  Synthetic
cauacaggauucccugcugg

SEQ ID NO: 12651 - RNA, 20 nt, Artificial Sequence
  Synthetic
guuucacgugaaccccgugg

SEQ ID NO: 12652 - RNA, 20 nt, Artificial Sequence
  Synthetic
gacgugcuccagggcggugg

SEQ ID NO: 12653 - RNA, 20 nt, Artificial Sequence
  Synthetic
guccaggaugaaccgggugg

SEQ ID NO: 12654 - RNA, 20 nt, Artificial Sequence
  Synthetic
cucggccgucgcgcgcuugg

SEQ ID NO: 12655 - RNA, 20 nt, Artificial Sequence
  Synthetic
uuacuucucccaccuguugg

SEQ ID NO: 12656 - RNA, 20 nt, Artificial Sequence
  Synthetic
acacgccccggccguucaug

SEQ ID NO: 12657 - RNA, 20 nt, Artificial Sequence
  Synthetic
acggccgagagcuccagaug

SEQ ID NO: 12658 - RNA, 20 nt, Artificial Sequence
  Synthetic
gaaacagcgcgcgcgagaug

SEQ ID NO: 12659 - RNA, 20 nt, Artificial Sequence
  Synthetic
acccaccgccccgaacccug

SEQ ID NO: 12660 - RNA, 20 nt, Artificial Sequence
  Synthetic
gggggcgggcucguccccug

SEQ ID NO: 12661 - RNA, 20 nt, Artificial Sequence
  Synthetic
gcuucagcacgcucucccug

SEQ ID NO: 12662 - RNA, 20 nt, Artificial Sequence
  Synthetic
cuccucguccucccgggcug

SEQ ID NO: 12663 - RNA, 20 nt, Artificial Sequence
  Synthetic
ugugggccuggaugaugcug

SEQ ID NO: 12664 - RNA, 20 nt, Artificial Sequence
  Synthetic
aaagguuuauucccgaagug

SEQ ID NO: 12665 - RNA, 20 nt, Artificial Sequence
  Synthetic
ucacgugaaacccggaagug

SEQ ID NO: 12666 - RNA, 20 nt, Artificial Sequence
  Synthetic
agaccgccggcaggcacgug

SEQ ID NO: 12667 - RNA, 20 nt, Artificial Sequence
  Synthetic
ccgucagcccggcggccgug

SEQ ID NO: 12668 - RNA, 20 nt, Artificial Sequence
  Synthetic
gcgcucgcagagaucucgug

SEQ ID NO: 12669 - RNA, 20 nt, Artificial Sequence
  Synthetic
cgaccagggcccuggaggug

SEQ ID NO: 12670 - RNA, 20 nt, Artificial Sequence
  Synthetic
gucugcucaguucggcggug

SEQ ID NO: 12671 - RNA, 20 nt, Artificial Sequence
  Synthetic
caucaagaaguacgagggug

SEQ ID NO: 12672 - RNA, 20 nt, Artificial Sequence
  Synthetic
gcuggccgucguagauggug

SEQ ID NO: 12673 - RNA, 20 nt, Artificial Sequence
  Synthetic
gcgugcugaagcacagguug

SEQ ID NO: 12674 - RNA, 20 nt, Artificial Sequence
  Synthetic
auuacuucucccaccuguug

SEQ ID NO: 12675 - RNA, 20 nt, Artificial Sequence
  Synthetic
gucggccgccuccgggaaau

SEQ ID NO: 12676 - RNA, 20 nt, Artificial Sequence
  Synthetic
guagaugaugcgcauggaau

SEQ ID NO: 12677 - RNA, 20 nt, Artificial Sequence
  Synthetic
guguuucgcgugugggacau

SEQ ID NO: 12678 - RNA, 20 nt, Artificial Sequence
  Synthetic
aucgccaagaaaaaguacau

SEQ ID NO: 12679 - RNA, 20 nt, Artificial Sequence
  Synthetic
gccgcgacggugacgaccau

SEQ ID NO: 12680 - RNA, 20 nt, Artificial Sequence
  Synthetic
ccguccucguagacgcccau

SEQ ID NO: 12681 - RNA, 20 nt, Artificial Sequence
  Synthetic
gacggccgagagcuccagau

SEQ ID NO: 12682 - RNA, 20 nt, Artificial Sequence
  Synthetic
cgggucggugaugcgccgau

SEQ ID NO: 12683 - RNA, 20 nt, Artificial Sequence
  Synthetic
cccgcgcaacgcggggugau

SEQ ID NO: 12684 - RNA, 20 nt, Artificial Sequence
  Synthetic
caucaaggucguguguaacu

SEQ ID NO: 12685 - RNA, 20 nt, Artificial Sequence
  Synthetic
ggcgccccuaaaucgccccu

SEQ ID NO: 12686 - RNA, 20 nt, Artificial Sequence
  Synthetic
ggggggcgggcucguccccu

SEQ ID NO: 12687 - RNA, 20 nt, Artificial Sequence
  Synthetic
cccgaacgccugcagucccu

SEQ ID NO: 12688 - RNA, 20 nt, Artificial Sequence
  Synthetic
aauggcguaugcgggauccu

SEQ ID NO: 12689 - RNA, 20 nt, Artificial Sequence
  Synthetic
gggaccgucaucacgcuccu

SEQ ID NO: 12690 - RNA, 20 nt, Artificial Sequence
  Synthetic
ugcgggauccucggccagcu

SEQ ID NO: 12691 - RNA, 20 nt, Artificial Sequence
  Synthetic
cuuggcgaucagcagcagcu

SEQ ID NO: 12692 - RNA, 20 nt, Artificial Sequence
  Synthetic
cuuguaaauguccgucagcu

SEQ ID NO: 12693 - RNA, 20 nt, Artificial Sequence
  Synthetic
ccgggcugcggccggacgcu

SEQ ID NO: 12694 - RNA, 20 nt, Artificial Sequence
  Synthetic
cgaguacguccacgcgcgcu

SEQ ID NO: 12695 - RNA, 20 nt, Artificial Sequence
  Synthetic
gcucucggccgucgcgcgcu

SEQ ID NO: 12696 - RNA, 20 nt, Artificial Sequence
  Synthetic
ccacuccuccgcggggcgcu

SEQ ID NO: 12697 - RNA, 20 nt, Artificial Sequence
  Synthetic
cggcgucucccgggggcgcu

SEQ ID NO: 12698 - RNA, 20 nt, Artificial Sequence
  Synthetic
cacguccuccuguuuucgcu

SEQ ID NO: 12699 - RNA, 20 nt, Artificial Sequence
  Synthetic
ggccaucggggccgccggcu

SEQ ID NO: 12700 - RNA, 20 nt, Artificial Sequence
  Synthetic
caccagcagcuugcggggcu

SEQ ID NO: 12701 - RNA, 20 nt, Artificial Sequence
  Synthetic
uugugggccuggaugaugcu

SEQ ID NO: 12702 - RNA, 20 nt, Artificial Sequence
  Synthetic
uaacagacucucggugaucu

SEQ ID NO: 12703 - RNA, 20 nt, Artificial Sequence
  Synthetic
aaaccuuuuuaacagacucu

SEQ ID NO: 12704 - RNA, 20 nt, Artificial Sequence
  Synthetic
uuugccccaucuggagcucu

SEQ ID NO: 12705 - RNA, 20 nt, Artificial Sequence
  Synthetic
cuccucuaccucgcgggucu

SEQ ID NO: 12706 - RNA, 20 nt, Artificial Sequence
  Synthetic
gacgccgauguacuuuuucu

SEQ ID NO: 12707 - RNA, 20 nt, Artificial Sequence
  Synthetic
uucacgugaaacccggaagu

SEQ ID NO: 12708 - RNA, 20 nt, Artificial Sequence
  Synthetic
cgcgggcccggcggcguagu

SEQ ID NO: 12709 - RNA, 20 nt, Artificial Sequence
  Synthetic
cgucucguaguaguacacgu

SEQ ID NO: 12710 - RNA, 20 nt, Artificial Sequence
  Synthetic
gagaccgccggcaggcacgu

SEQ ID NO: 12711 - RNA, 20 nt, Artificial Sequence
  Synthetic
agcgugaugacgguccccgu

SEQ ID NO: 12712 - RNA, 20 nt, Artificial Sequence
  Synthetic
cguguucagggcgacgccgu

SEQ ID NO: 12713 - RNA, 20 nt, Artificial Sequence
  Synthetic
gccgccgggcugacggccgu

SEQ ID NO: 12714 - RNA, 20 nt, Artificial Sequence
  Synthetic
aauuccagaaccacgggcgu

SEQ ID NO: 12715 - RNA, 20 nt, Artificial Sequence
  Synthetic
cuccaggugcgccacugcgu

SEQ ID NO: 12716 - RNA, 20 nt, Artificial Sequence
  Synthetic
ugcgcucgcagagaucucgu

SEQ ID NO: 12717 - RNA, 20 nt, Artificial Sequence
  Synthetic
cuuguaauacaccgucaggu

SEQ ID NO: 12718 - RNA, 20 nt, Artificial Sequence
  Synthetic
ggccgccagcucguucaggu

SEQ ID NO: 12719 - RNA, 20 nt, Artificial Sequence
  Synthetic
acaugagcuuguaugccggu

SEQ ID NO: 12720 - RNA, 20 nt, Artificial Sequence
  Synthetic
accgcaggguucggggcggu

SEQ ID NO: 12721 - RNA, 20 nt, Artificial Sequence
  Synthetic
ccaucaagaaguacgagggu

SEQ ID NO: 12722 - RNA, 20 nt, Artificial Sequence
  Synthetic
cuggaugucccucuccgggu

SEQ ID NO: 12723 - RNA, 20 nt, Artificial Sequence
  Synthetic
ggacgcgccucccggggggu

SEQ ID NO: 12724 - RNA, 20 nt, Artificial Sequence
  Synthetic
auacaggauucccugcuggu

SEQ ID NO: 12725 - RNA, 20 nt, Artificial Sequence
  Synthetic
cagaauaaagcccuucuggu

SEQ ID NO: 12726 - RNA, 20 nt, Artificial Sequence
  Synthetic
gggcccgggggcgcgcaugu

SEQ ID NO: 12727 - RNA, 20 nt, Artificial Sequence
  Synthetic
cagcgaauucgagaugcugu

SEQ ID NO: 12728 - RNA, 20 nt, Artificial Sequence
  Synthetic
ccggggcguguuucgcgugu

SEQ ID NO: 12729 - RNA, 20 nt, Artificial Sequence
  Synthetic
cucguggggcgcggcauugu

SEQ ID NO: 12730 - RNA, 20 nt, Artificial Sequence
  Synthetic
caggugggccaggcgcuugu

SEQ ID NO: 12731 - RNA, 20 nt, Artificial Sequence
  Synthetic
gcucgagagcuugaucuugu

SEQ ID NO: 12732 - RNA, 20 nt, Artificial Sequence
  Synthetic
cgugcugaagcacagguugu

SEQ ID NO: 12733 - RNA, 20 nt, Artificial Sequence
  Synthetic
aaccccggguucgucaccuu

SEQ ID NO: 12734 - RNA, 20 nt, Artificial Sequence
  Synthetic
cgggcugcggccggacgcuu

SEQ ID NO: 12735 - RNA, 20 nt, Artificial Sequence
  Synthetic
acgacagcacacgcccgcuu

SEQ ID NO: 12736 - RNA, 20 nt, Artificial Sequence
  Synthetic
cuuguccuucaggacggcuu

SEQ ID NO: 12737 - RNA, 20 nt, Artificial Sequence
  Synthetic
gcgcgggugucugcucaguu

SEQ ID NO: 12738 - RNA, 19 nt, Artificial Sequence
  Synthetic
guuuugccucaaacaaggc

SEQ ID NO: 12739 - RNA, 21 nt, Artificial Sequence
  Synthetic
guacgcgugcuccacguucuc

SEQ ID NO: 12740 - RNA, 24 nt, Artificial Sequence
  Synthetic
gccguacgcgugcuccacguucuc

SEQ ID NO: 12741 - RNA, 19 nt, Artificial Sequence
  Synthetic
guccagcacccgcggggcg

SEQ ID NO: 12742 - RNA, 18 nt, Artificial Sequence
  Synthetic
gcuauaguacguauggcg

SEQ ID NO: 12743 - RNA, 24 nt, Artificial Sequence
  Synthetic
gcauucgcuauaguacguauggcg

SEQ ID NO: 12744 - RNA, 23 nt, Artificial Sequence
  Synthetic
guacacgugaaagacggugacgg

SEQ ID NO: 12745 - RNA, 21 nt, Artificial Sequence
  Synthetic
gcgucccgacuggggcgaggu

SEQ ID NO: 12746 - RNA, 24 nt, Artificial Sequence
  Synthetic
guugcgucccgacuggggcgaggu

SEQ ID NO: 12747 - RNA, 18 nt, Artificial Sequence
  Synthetic
gccccgcgggugcuggac

SEQ ID NO: 12748 - RNA, 23 nt, Artificial Sequence
  Synthetic
gaugaauuucgauucaucgcccc

SEQ ID NO: 12749 - RNA, 23 nt, Artificial Sequence
  Synthetic
gaugcccccccggagaagcgcgc

SEQ ID NO: 12750 - RNA, 24 nt, Artificial Sequence
  Synthetic
ggaugcccccccggagaagcgcgc

SEQ ID NO: 12751 - RNA, 19 nt, Artificial Sequence
  Synthetic
gagcgcgacguccuccgcg

SEQ ID NO: 12752 - RNA, 22 nt, Artificial Sequence
  Synthetic
gacgagcgcgacguccuccgcg

SEQ ID NO: 12753 - RNA, 23 nt, Artificial Sequence
  Synthetic
ggacgagcgcgacguccuccgcg

SEQ ID NO: 12754 - RNA, 24 nt, Artificial Sequence
  Synthetic
gggacgagcgcgacguccuccgcg

SEQ ID NO: 12755 - RNA, 24 nt, Artificial Sequence
  Synthetic
gccauacguacuauagcgaaugcg

SEQ ID NO: 12756 - RNA, 21 nt, Artificial Sequence
  Synthetic
gcggcguggaccacgccccgg

SEQ ID NO: 12757 - RNA, 22 nt, Artificial Sequence
  Synthetic
ggcggcguggaccacgccccgg

SEQ ID NO: 12758 - RNA, 23 nt, Artificial Sequence
  Synthetic
gggcggcguggaccacgccccgg

SEQ ID NO: 12759 - RNA, 24 nt, Artificial Sequence
  Synthetic
ggggcggcguggaccacgccccgg

SEQ ID NO: 12760 - RNA, 24 nt, Artificial Sequence
  Synthetic
gaaagucggcggccagggcggcgu

SEQ ID NO: 12761 - RNA, 18 nt, Artificial Sequence
  Synthetic
uuuugccucaaacaaggc

SEQ ID NO: 12762 - RNA, 21 nt, Artificial Sequence
  Synthetic
aaguuuugccucaaacaaggc

SEQ ID NO: 12763 - RNA, 22 nt, Artificial Sequence
  Synthetic
aaaguuuugccucaaacaaggc

SEQ ID NO: 12764 - RNA, 23 nt, Artificial Sequence
  Synthetic
aaaaguuuugccucaaacaaggc

SEQ ID NO: 12765 - RNA, 24 nt, Artificial Sequence
  Synthetic
uaaaaguuuugccucaaacaaggc

SEQ ID NO: 12766 - RNA, 18 nt, Artificial Sequence
  Synthetic
cgcgugcuccacguucuc

SEQ ID NO: 12767 - RNA, 19 nt, Artificial Sequence
  Synthetic
acgcgugcuccacguucuc

SEQ ID NO: 12768 - RNA, 22 nt, Artificial Sequence
  Synthetic
cguacgcgugcuccacguucuc

SEQ ID NO: 12769 - RNA, 23 nt, Artificial Sequence
  Synthetic
ccguacgcgugcuccacguucuc

SEQ ID NO: 12770 - RNA, 18 nt, Artificial Sequence
  Synthetic
uccagcacccgcggggcg

SEQ ID NO: 12771 - RNA, 21 nt, Artificial Sequence
  Synthetic
ucguccagcacccgcggggcg

SEQ ID NO: 12772 - RNA, 22 nt, Artificial Sequence
  Synthetic
cucguccagcacccgcggggcg

SEQ ID NO: 12773 - RNA, 23 nt, Artificial Sequence
  Synthetic
ccucguccagcacccgcggggcg

SEQ ID NO: 12774 - RNA, 24 nt, Artificial Sequence
  Synthetic
uccucguccagcacccgcggggcg

SEQ ID NO: 12775 - RNA, 19 nt, Artificial Sequence
  Synthetic
cgcuauaguacguauggcg

SEQ ID NO: 12776 - RNA, 21 nt, Artificial Sequence
  Synthetic
uucgcuauaguacguauggcg

SEQ ID NO: 12777 - RNA, 22 nt, Artificial Sequence
  Synthetic
auucgcuauaguacguauggcg

SEQ ID NO: 12778 - RNA, 23 nt, Artificial Sequence
  Synthetic
cauucgcuauaguacguauggcg

SEQ ID NO: 12779 - RNA, 18 nt, Artificial Sequence
  Synthetic
cgugaaagacggugacgg

SEQ ID NO: 12780 - RNA, 19 nt, Artificial Sequence
  Synthetic
acgugaaagacggugacgg

SEQ ID NO: 12781 - RNA, 21 nt, Artificial Sequence
  Synthetic
acacgugaaagacggugacgg

SEQ ID NO: 12782 - RNA, 22 nt, Artificial Sequence
  Synthetic
uacacgugaaagacggugacgg

SEQ ID NO: 12783 - RNA, 24 nt, Artificial Sequence
  Synthetic
cguacacgugaaagacggugacgg

SEQ ID NO: 12784 - RNA, 22 nt, Artificial Sequence
  Synthetic
ugcgucccgacuggggcgaggu

SEQ ID NO: 12785 - RNA, 23 nt, Artificial Sequence
  Synthetic
uugcgucccgacuggggcgaggu

SEQ ID NO: 12786 - RNA, 18 nt, Artificial Sequence
  Synthetic
agcgccauacguacuaua

SEQ ID NO: 12787 - RNA, 19 nt, Artificial Sequence
  Synthetic
cagcgccauacguacuaua

SEQ ID NO: 12788 - RNA, 21 nt, Artificial Sequence
  Synthetic
cccagcgccauacguacuaua

SEQ ID NO: 12789 - RNA, 22 nt, Artificial Sequence
  Synthetic
acccagcgccauacguacuaua

SEQ ID NO: 12790 - RNA, 23 nt, Artificial Sequence
  Synthetic
aacccagcgccauacguacuaua

SEQ ID NO: 12791 - RNA, 24 nt, Artificial Sequence
  Synthetic
caacccagcgccauacguacuaua

SEQ ID NO: 12792 - RNA, 19 nt, Artificial Sequence
  Synthetic
cgccccgcgggugcuggac

SEQ ID NO: 12793 - RNA, 21 nt, Artificial Sequence
  Synthetic
aucgccccgcgggugcuggac

SEQ ID NO: 12794 - RNA, 22 nt, Artificial Sequence
  Synthetic
caucgccccgcgggugcuggac

SEQ ID NO: 12795 - RNA, 23 nt, Artificial Sequence
  Synthetic
ucaucgccccgcgggugcuggac

SEQ ID NO: 12796 - RNA, 24 nt, Artificial Sequence
  Synthetic
uucaucgccccgcgggugcuggac

SEQ ID NO: 12797 - RNA, 18 nt, Artificial Sequence
  Synthetic
auuucgauucaucgcccc

SEQ ID NO: 12798 - RNA, 19 nt, Artificial Sequence
  Synthetic
aauuucgauucaucgcccc

SEQ ID NO: 12799 - RNA, 21 nt, Artificial Sequence
  Synthetic
ugaauuucgauucaucgcccc

SEQ ID NO: 12800 - RNA, 22 nt, Artificial Sequence
  Synthetic
augaauuucgauucaucgcccc

SEQ ID NO: 12801 - RNA, 24 nt, Artificial Sequence
  Synthetic
cgaugaauuucgauucaucgcccc

SEQ ID NO: 12802 - RNA, 18 nt, Artificial Sequence
  Synthetic
ccccccggagaagcgcgc

SEQ ID NO: 12803 - RNA, 19 nt, Artificial Sequence
  Synthetic
cccccccggagaagcgcgc

SEQ ID NO: 12804 - RNA, 21 nt, Artificial Sequence
  Synthetic
ugcccccccggagaagcgcgc

SEQ ID NO: 12805 - RNA, 22 nt, Artificial Sequence
  Synthetic
augcccccccggagaagcgcgc

SEQ ID NO: 12806 - RNA, 18 nt, Artificial Sequence
  Synthetic
agcgcgacguccuccgcg

SEQ ID NO: 12807 - RNA, 21 nt, Artificial Sequence
  Synthetic
acgagcgcgacguccuccgcg

SEQ ID NO: 12808 - RNA, 18 nt, Artificial Sequence
  Synthetic
cguacuauagcgaaugcg

SEQ ID NO: 12809 - RNA, 19 nt, Artificial Sequence
  Synthetic
acguacuauagcgaaugcg

SEQ ID NO: 12810 - RNA, 21 nt, Artificial Sequence
  Synthetic
auacguacuauagcgaaugcg

SEQ ID NO: 12811 - RNA, 22 nt, Artificial Sequence
  Synthetic
cauacguacuauagcgaaugcg

SEQ ID NO: 12812 - RNA, 23 nt, Artificial Sequence
  Synthetic
ccauacguacuauagcgaaugcg

SEQ ID NO: 12813 - RNA, 21 nt, Artificial Sequence
  Synthetic
agucggcggccagggcggcgu

SEQ ID NO: 12814 - RNA, 22 nt, Artificial Sequence
  Synthetic
aagucggcggccagggcggcgu

SEQ ID NO: 12815 - RNA, 23 nt, Artificial Sequence
  Synthetic
aaagucggcggccagggcggcgu

SEQ ID NO: 12816 - RNA, 18 nt, Artificial Sequence
  Synthetic
ucccgacuggggcgaggu

SEQ ID NO: 12817 - RNA, 19 nt, Artificial Sequence
  Synthetic
gucccgacuggggcgaggu

SEQ ID NO: 12818 - RNA, 18 nt, Artificial Sequence
  Synthetic
gcguggaccacgccccgg

SEQ ID NO: 12819 - RNA, 19 nt, Artificial Sequence
  Synthetic
ggcguggaccacgccccgg

SEQ ID NO: 12820 - RNA, 18 nt, Artificial Sequence
  Synthetic
cggcggccagggcggcgu

SEQ ID NO: 12821 - RNA, 19 nt, Artificial Sequence
  Synthetic
ucggcggccagggcggcgu

SEQ ID NO: 12822 - RNA, 18 nt, Artificial Sequence
  Synthetic
cauaaaccgcgcguggaa

SEQ ID NO: 12823 - RNA, 19 nt, Artificial Sequence
  Synthetic
ccauaaaccgcgcguggaa

SEQ ID NO: 12824 - RNA, 20 nt, Artificial Sequence
  Synthetic
uccauaaaccgcgcguggaa

SEQ ID NO: 12825 - RNA, 21 nt, Artificial Sequence
  Synthetic
guccauaaaccgcgcguggaa

SEQ ID NO: 12826 - RNA, 22 nt, Artificial Sequence
  Synthetic
cguccauaaaccgcgcguggaa

SEQ ID NO: 12827 - RNA, 23 nt, Artificial Sequence
  Synthetic
gcguccauaaaccgcgcguggaa

SEQ ID NO: 12828 - RNA, 24 nt, Artificial Sequence
  Synthetic
ggcguccauaaaccgcgcguggaa

SEQ ID NO: 12829 - RNA, 18 nt, Artificial Sequence
  Synthetic
cacccgcggggcgaugaa

SEQ ID NO: 12830 - RNA, 19 nt, Artificial Sequence
  Synthetic
gcacccgcggggcgaugaa

SEQ ID NO: 12831 - RNA, 21 nt, Artificial Sequence
  Synthetic
cagcacccgcggggcgaugaa

SEQ ID NO: 12832 - RNA, 22 nt, Artificial Sequence
  Synthetic
ccagcacccgcggggcgaugaa

SEQ ID NO: 12833 - RNA, 23 nt, Artificial Sequence
  Synthetic
uccagcacccgcggggcgaugaa

SEQ ID NO: 12834 - RNA, 24 nt, Artificial Sequence
  Synthetic
guccagcacccgcggggcgaugaa

SEQ ID NO: 12835 - RNA, 18 nt, Artificial Sequence
  Synthetic
acuuuccuccgggggaca

SEQ ID NO: 12836 - RNA, 19 nt, Artificial Sequence
  Synthetic
gacuuuccuccgggggaca

SEQ ID NO: 12837 - RNA, 21 nt, Artificial Sequence
  Synthetic
ccgacuuuccuccgggggaca

SEQ ID NO: 12838 - RNA, 22 nt, Artificial Sequence
  Synthetic
gccgacuuuccuccgggggaca

SEQ ID NO: 12839 - RNA, 23 nt, Artificial Sequence
  Synthetic
cgccgacuuuccuccgggggaca

SEQ ID NO: 12840 - RNA, 24 nt, Artificial Sequence
  Synthetic
ccgccgacuuuccuccgggggaca

SEQ ID NO: 12841 - RNA, 18 nt, Artificial Sequence
  Synthetic
gacagcgggccgccgcca

SEQ ID NO: 12842 - RNA, 19 nt, Artificial Sequence
  Synthetic
ggacagcgggccgccgcca

SEQ ID NO: 12843 - RNA, 21 nt, Artificial Sequence
  Synthetic
ggggacagcgggccgccgcca

SEQ ID NO: 12844 - RNA, 22 nt, Artificial Sequence
  Synthetic
gggggacagcgggccgccgcca

SEQ ID NO: 12845 - RNA, 23 nt, Artificial Sequence
  Synthetic
cgggggacagcgggccgccgcca

SEQ ID NO: 12846 - RNA, 24 nt, Artificial Sequence
  Synthetic
ccgggggacagcgggccgccgcca

SEQ ID NO: 12847 - RNA, 18 nt, Artificial Sequence
  Synthetic
gcuucuguugcgucccga

SEQ ID NO: 12848 - RNA, 19 nt, Artificial Sequence
  Synthetic
ggcuucuguugcgucccga

SEQ ID NO: 12849 - RNA, 21 nt, Artificial Sequence
  Synthetic
ucggcuucuguugcgucccga

SEQ ID NO: 12850 - RNA, 22 nt, Artificial Sequence
  Synthetic
gucggcuucuguugcgucccga

SEQ ID NO: 12851 - RNA, 23 nt, Artificial Sequence
  Synthetic
ggucggcuucuguugcgucccga

SEQ ID NO: 12852 - RNA, 24 nt, Artificial Sequence
  Synthetic
cggucggcuucuguugcgucccga

SEQ ID NO: 12853 - RNA, 18 nt, Artificial Sequence
  Synthetic
ccggcgggcgcaaaaaac

SEQ ID NO: 12854 - RNA, 19 nt, Artificial Sequence
  Synthetic
gccggcgggcgcaaaaaac

SEQ ID NO: 12855 - RNA, 21 nt, Artificial Sequence
  Synthetic
gggccggcgggcgcaaaaaac

SEQ ID NO: 12856 - RNA, 22 nt, Artificial Sequence
  Synthetic
agggccggcgggcgcaaaaaac

SEQ ID NO: 12857 - RNA, 23 nt, Artificial Sequence
  Synthetic
gagggccggcgggcgcaaaaaac

SEQ ID NO: 12858 - RNA, 24 nt, Artificial Sequence
  Synthetic
cgagggccggcgggcgcaaaaaac

SEQ ID NO: 12859 - RNA, 18 nt, Artificial Sequence
  Synthetic
cuccaggaugucguacac

SEQ ID NO: 12860 - RNA, 19 nt, Artificial Sequence
  Synthetic
ucuccaggaugucguacac

SEQ ID NO: 12861 - RNA, 21 nt, Artificial Sequence
  Synthetic
guucuccaggaugucguacac

SEQ ID NO: 12862 - RNA, 22 nt, Artificial Sequence
  Synthetic
cguucuccaggaugucguacac

SEQ ID NO: 12863 - RNA, 23 nt, Artificial Sequence
  Synthetic
acguucuccaggaugucguacac

SEQ ID NO: 12864 - RNA, 24 nt, Artificial Sequence
  Synthetic
cacguucuccaggaugucguacac

SEQ ID NO: 12865 - RNA, 18 nt, Artificial Sequence
  Synthetic
caucgcgguuguucccac

SEQ ID NO: 12866 - RNA, 19 nt, Artificial Sequence
  Synthetic
acaucgcgguuguucccac

SEQ ID NO: 12867 - RNA, 20 nt, Artificial Sequence
  Synthetic
aacaucgcgguuguucccac

SEQ ID NO: 12868 - RNA, 21 nt, Artificial Sequence
  Synthetic
aaacaucgcgguuguucccac

SEQ ID NO: 12869 - RNA, 22 nt, Artificial Sequence
  Synthetic
aaaacaucgcgguuguucccac

SEQ ID NO: 12870 - RNA, 23 nt, Artificial Sequence
  Synthetic
gaaaacaucgcgguuguucccac

SEQ ID NO: 12871 - RNA, 24 nt, Artificial Sequence
  Synthetic
ggaaaacaucgcgguuguucccac

SEQ ID NO: 12872 - RNA, 18 nt, Artificial Sequence
  Synthetic
acagcgggccgccgccac

SEQ ID NO: 12873 - RNA, 19 nt, Artificial Sequence
  Synthetic
gacagcgggccgccgccac

SEQ ID NO: 12874 - RNA, 21 nt, Artificial Sequence
  Synthetic
gggacagcgggccgccgccac

SEQ ID NO: 12875 - RNA, 22 nt, Artificial Sequence
  Synthetic
ggggacagcgggccgccgccac

SEQ ID NO: 12876 - RNA, 23 nt, Artificial Sequence
  Synthetic
gggggacagcgggccgccgccac

SEQ ID NO: 12877 - RNA, 24 nt, Artificial Sequence
  Synthetic
cgggggacagcgggccgccgccac

SEQ ID NO: 12878 - RNA, 18 nt, Artificial Sequence
  Synthetic
gaagccgcccgacccgac

SEQ ID NO: 12879 - RNA, 19 nt, Artificial Sequence
  Synthetic
agaagccgcccgacccgac

SEQ ID NO: 12880 - RNA, 21 nt, Artificial Sequence
  Synthetic
ccagaagccgcccgacccgac

SEQ ID NO: 12881 - RNA, 22 nt, Artificial Sequence
  Synthetic
gccagaagccgcccgacccgac

SEQ ID NO: 12882 - RNA, 23 nt, Artificial Sequence
  Synthetic
ggccagaagccgcccgacccgac

SEQ ID NO: 12883 - RNA, 24 nt, Artificial Sequence
  Synthetic
cggccagaagccgcccgacccgac

SEQ ID NO: 12884 - RNA, 18 nt, Artificial Sequence
  Synthetic
cuucuguugcgucccgac

SEQ ID NO: 12885 - RNA, 19 nt, Artificial Sequence
  Synthetic
gcuucuguugcgucccgac

SEQ ID NO: 12886 - RNA, 21 nt, Artificial Sequence
  Synthetic
cggcuucuguugcgucccgac

SEQ ID NO: 12887 - RNA, 22 nt, Artificial Sequence
  Synthetic
ucggcuucuguugcgucccgac

SEQ ID NO: 12888 - RNA, 23 nt, Artificial Sequence
  Synthetic
gucggcuucuguugcgucccgac

SEQ ID NO: 12889 - RNA, 24 nt, Artificial Sequence
  Synthetic
ggucggcuucuguugcgucccgac

SEQ ID NO: 12890 - RNA, 18 nt, Artificial Sequence
  Synthetic
ucccccccgcaguacacc

SEQ ID NO: 12891 - RNA, 19 nt, Artificial Sequence
  Synthetic
gucccccccgcaguacacc

SEQ ID NO: 12892 - RNA, 21 nt, Artificial Sequence
  Synthetic
ucgucccccccgcaguacacc

SEQ ID NO: 12893 - RNA, 22 nt, Artificial Sequence
  Synthetic
cucgucccccccgcaguacacc

SEQ ID NO: 12894 - RNA, 23 nt, Artificial Sequence
  Synthetic
gcucgucccccccgcaguacacc

SEQ ID NO: 12895 - RNA, 24 nt, Artificial Sequence
  Synthetic
cgcucgucccccccgcaguacacc

SEQ ID NO: 12896 - RNA, 18 nt, Artificial Sequence
  Synthetic
cauccucguccagcaccc

SEQ ID NO: 12897 - RNA, 19 nt, Artificial Sequence
  Synthetic
gcauccucguccagcaccc

SEQ ID NO: 12898 - RNA, 21 nt, Artificial Sequence
  Synthetic
gggcauccucguccagcaccc

SEQ ID NO: 12899 - RNA, 22 nt, Artificial Sequence
  Synthetic
ggggcauccucguccagcaccc

SEQ ID NO: 12900 - RNA, 23 nt, Artificial Sequence
  Synthetic
gggggcauccucguccagcaccc

SEQ ID NO: 12901 - RNA, 24 nt, Artificial Sequence
  Synthetic
ggggggcauccucguccagcaccc

SEQ ID NO: 12902 - RNA, 18 nt, Artificial Sequence
  Synthetic
ggccgccgacuuuccucc

SEQ ID NO: 12903 - RNA, 19 nt, Artificial Sequence
  Synthetic
uggccgccgacuuuccucc

SEQ ID NO: 12904 - RNA, 21 nt, Artificial Sequence
  Synthetic
ccuggccgccgacuuuccucc

SEQ ID NO: 12905 - RNA, 22 nt, Artificial Sequence
  Synthetic
cccuggccgccgacuuuccucc

SEQ ID NO: 12906 - RNA, 23 nt, Artificial Sequence
  Synthetic
gcccuggccgccgacuuuccucc

SEQ ID NO: 12907 - RNA, 24 nt, Artificial Sequence
  Synthetic
cgcccuggccgccgacuuuccucc

SEQ ID NO: 12908 - RNA, 18 nt, Artificial Sequence
  Synthetic
ggguccccggcuggcucc

SEQ ID NO: 12909 - RNA, 19 nt, Artificial Sequence
  Synthetic
gggguccccggcuggcucc

SEQ ID NO: 12910 - RNA, 21 nt, Artificial Sequence
  Synthetic
cggggguccccggcuggcucc

SEQ ID NO: 12911 - RNA, 22 nt, Artificial Sequence
  Synthetic
gcggggguccccggcuggcucc

SEQ ID NO: 12912 - RNA, 23 nt, Artificial Sequence
  Synthetic
ggcggggguccccggcuggcucc

SEQ ID NO: 12913 - RNA, 24 nt, Artificial Sequence
  Synthetic
aggcggggguccccggcuggcucc

SEQ ID NO: 12914 - RNA, 18 nt, Artificial Sequence
  Synthetic
accccggcgcgcuucucc

SEQ ID NO: 12915 - RNA, 19 nt, Artificial Sequence
  Synthetic
caccccggcgcgcuucucc

SEQ ID NO: 12916 - RNA, 21 nt, Artificial Sequence
  Synthetic
ugcaccccggcgcgcuucucc

SEQ ID NO: 12917 - RNA, 22 nt, Artificial Sequence
  Synthetic
gugcaccccggcgcgcuucucc

SEQ ID NO: 12918 - RNA, 23 nt, Artificial Sequence
  Synthetic
cgugcaccccggcgcgcuucucc

SEQ ID NO: 12919 - RNA, 24 nt, Artificial Sequence
  Synthetic
ucgugcaccccggcgcgcuucucc

SEQ ID NO: 12920 - RNA, 18 nt, Artificial Sequence
  Synthetic
ggugggguugaaccccgc

SEQ ID NO: 12921 - RNA, 19 nt, Artificial Sequence
  Synthetic
cggugggguugaaccccgc

SEQ ID NO: 12922 - RNA, 21 nt, Artificial Sequence
  Synthetic
gacggugggguugaaccccgc

SEQ ID NO: 12923 - RNA, 22 nt, Artificial Sequence
  Synthetic
ugacggugggguugaaccccgc

SEQ ID NO: 12924 - RNA, 23 nt, Artificial Sequence
  Synthetic
gugacggugggguugaaccccgc

SEQ ID NO: 12925 - RNA, 24 nt, Artificial Sequence
  Synthetic
ggugacggugggguugaaccccgc

SEQ ID NO: 12926 - RNA, 18 nt, Artificial Sequence
  Synthetic
guccccggcuggcuccgc

SEQ ID NO: 12927 - RNA, 19 nt, Artificial Sequence
  Synthetic
gguccccggcuggcuccgc

SEQ ID NO: 12928 - RNA, 21 nt, Artificial Sequence
  Synthetic
gggguccccggcuggcuccgc

SEQ ID NO: 12929 - RNA, 22 nt, Artificial Sequence
  Synthetic
ggggguccccggcuggcuccgc

SEQ ID NO: 12930 - RNA, 23 nt, Artificial Sequence
  Synthetic
cggggguccccggcuggcuccgc

SEQ ID NO: 12931 - RNA, 24 nt, Artificial Sequence
  Synthetic
gcggggguccccggcuggcuccgc

SEQ ID NO: 12932 - RNA, 18 nt, Artificial Sequence
  Synthetic
ggcguccauaaaccgcgc

SEQ ID NO: 12933 - RNA, 19 nt, Artificial Sequence
  Synthetic
uggcguccauaaaccgcgc

SEQ ID NO: 12934 - RNA, 20 nt, Artificial Sequence
  Synthetic
auggcguccauaaaccgcgc

SEQ ID NO: 12935 - RNA, 21 nt, Artificial Sequence
  Synthetic
gauggcguccauaaaccgcgc

SEQ ID NO: 12936 - RNA, 22 nt, Artificial Sequence
  Synthetic
ugauggcguccauaaaccgcgc

SEQ ID NO: 12937 - RNA, 23 nt, Artificial Sequence
  Synthetic
gugauggcguccauaaaccgcgc

SEQ ID NO: 12938 - RNA, 24 nt, Artificial Sequence
  Synthetic
ugugauggcguccauaaaccgcgc

SEQ ID NO: 12939 - RNA, 18 nt, Artificial Sequence
  Synthetic
uacaccuugggggcgcgc

SEQ ID NO: 12940 - RNA, 19 nt, Artificial Sequence
  Synthetic
guacaccuugggggcgcgc

SEQ ID NO: 12941 - RNA, 21 nt, Artificial Sequence
  Synthetic
caguacaccuugggggcgcgc

SEQ ID NO: 12942 - RNA, 22 nt, Artificial Sequence
  Synthetic
gcaguacaccuugggggcgcgc

SEQ ID NO: 12943 - RNA, 23 nt, Artificial Sequence
  Synthetic
cgcaguacaccuugggggcgcgc

SEQ ID NO: 12944 - RNA, 24 nt, Artificial Sequence
  Synthetic
ccgcaguacaccuugggggcgcgc

SEQ ID NO: 12945 - RNA, 18 nt, Artificial Sequence
  Synthetic
ccacgccgccccacaggc

SEQ ID NO: 12946 - RNA, 19 nt, Artificial Sequence
  Synthetic
uccacgccgccccacaggc

SEQ ID NO: 12947 - RNA, 21 nt, Artificial Sequence
  Synthetic
gguccacgccgccccacaggc

SEQ ID NO: 12948 - RNA, 22 nt, Artificial Sequence
  Synthetic
ugguccacgccgccccacaggc

SEQ ID NO: 12949 - RNA, 23 nt, Artificial Sequence
  Synthetic
gugguccacgccgccccacaggc

SEQ ID NO: 12950 - RNA, 24 nt, Artificial Sequence
  Synthetic
cgugguccacgccgccccacaggc

SEQ ID NO: 12951 - RNA, 18 nt, Artificial Sequence
  Synthetic
aggcgcgagcgccgcggc

SEQ ID NO: 12952 - RNA, 19 nt, Artificial Sequence
  Synthetic
caggcgcgagcgccgcggc

SEQ ID NO: 12953 - RNA, 21 nt, Artificial Sequence
  Synthetic
cacaggcgcgagcgccgcggc

SEQ ID NO: 12954 - RNA, 22 nt, Artificial Sequence
  Synthetic
ccacaggcgcgagcgccgcggc

SEQ ID NO: 12955 - RNA, 23 nt, Artificial Sequence
  Synthetic
cccacaggcgcgagcgccgcggc

SEQ ID NO: 12956 - RNA, 24 nt, Artificial Sequence
  Synthetic
ccccacaggcgcgagcgccgcggc

SEQ ID NO: 12957 - RNA, 18 nt, Artificial Sequence
  Synthetic
uggccgccgacuuuccuc

SEQ ID NO: 12958 - RNA, 19 nt, Artificial Sequence
  Synthetic
cuggccgccgacuuuccuc

SEQ ID NO: 12959 - RNA, 21 nt, Artificial Sequence
  Synthetic
cccuggccgccgacuuuccuc

SEQ ID NO: 12960 - RNA, 22 nt, Artificial Sequence
  Synthetic
gcccuggccgccgacuuuccuc

SEQ ID NO: 12961 - RNA, 23 nt, Artificial Sequence
  Synthetic
cgcccuggccgccgacuuuccuc

SEQ ID NO: 12962 - RNA, 24 nt, Artificial Sequence
  Synthetic
ccgcccuggccgccgacuuuccuc

SEQ ID NO: 12963 - RNA, 18 nt, Artificial Sequence
  Synthetic
caccccggcgcgcuucuc

SEQ ID NO: 12964 - RNA, 19 nt, Artificial Sequence
  Synthetic
gcaccccggcgcgcuucuc

SEQ ID NO: 12965 - RNA, 21 nt, Artificial Sequence
  Synthetic
gugcaccccggcgcgcuucuc

SEQ ID NO: 12966 - RNA, 22 nt, Artificial Sequence
  Synthetic
cgugcaccccggcgcgcuucuc

SEQ ID NO: 12967 - RNA, 23 nt, Artificial Sequence
  Synthetic
ucgugcaccccggcgcgcuucuc

SEQ ID NO: 12968 - RNA, 24 nt, Artificial Sequence
  Synthetic
gucgugcaccccggcgcgcuucuc

SEQ ID NO: 12969 - RNA, 18 nt, Artificial Sequence
  Synthetic
aguuuugccucaaacaag

SEQ ID NO: 12970 - RNA, 19 nt, Artificial Sequence
  Synthetic
aaguuuugccucaaacaag

SEQ ID NO: 12971 - RNA, 21 nt, Artificial Sequence
  Synthetic
aaaaguuuugccucaaacaag

SEQ ID NO: 12972 - RNA, 22 nt, Artificial Sequence
  Synthetic
uaaaaguuuugccucaaacaag

SEQ ID NO: 12973 - RNA, 23 nt, Artificial Sequence
  Synthetic
guaaaaguuuugccucaaacaag

SEQ ID NO: 12974 - RNA, 24 nt, Artificial Sequence
  Synthetic
uguaaaaguuuugccucaaacaag

SEQ ID NO: 12975 - RNA, 18 nt, Artificial Sequence
  Synthetic
aagccgcccgacccgacg

SEQ ID NO: 12976 - RNA, 19 nt, Artificial Sequence
  Synthetic
gaagccgcccgacccgacg

SEQ ID NO: 12977 - RNA, 21 nt, Artificial Sequence
  Synthetic
cagaagccgcccgacccgacg

SEQ ID NO: 12978 - RNA, 22 nt, Artificial Sequence
  Synthetic
ccagaagccgcccgacccgacg

SEQ ID NO: 12979 - RNA, 23 nt, Artificial Sequence
  Synthetic
gccagaagccgcccgacccgacg

SEQ ID NO: 12980 - RNA, 24 nt, Artificial Sequence
  Synthetic
ggccagaagccgcccgacccgacg

SEQ ID NO: 12981 - RNA, 18 nt, Artificial Sequence
  Synthetic
acgugaaagacggugacg

SEQ ID NO: 12982 - RNA, 19 nt, Artificial Sequence
  Synthetic
cacgugaaagacggugacg

SEQ ID NO: 12983 - RNA, 21 nt, Artificial Sequence
  Synthetic
uacacgugaaagacggugacg

SEQ ID NO: 12984 - RNA, 22 nt, Artificial Sequence
  Synthetic
guacacgugaaagacggugacg

SEQ ID NO: 12985 - RNA, 23 nt, Artificial Sequence
  Synthetic
cguacacgugaaagacggugacg

SEQ ID NO: 12986 - RNA, 24 nt, Artificial Sequence
  Synthetic
ucguacacgugaaagacggugacg

SEQ ID NO: 12987 - RNA, 18 nt, Artificial Sequence
  Synthetic
auccucguccagcacccg

SEQ ID NO: 12988 - RNA, 19 nt, Artificial Sequence
  Synthetic
cauccucguccagcacccg

SEQ ID NO: 12989 - RNA, 21 nt, Artificial Sequence
  Synthetic
ggcauccucguccagcacccg

SEQ ID NO: 12990 - RNA, 22 nt, Artificial Sequence
  Synthetic
gggcauccucguccagcacccg

SEQ ID NO: 12991 - RNA, 23 nt, Artificial Sequence
  Synthetic
ggggcauccucguccagcacccg

SEQ ID NO: 12992 - RNA, 24 nt, Artificial Sequence
  Synthetic
gggggcauccucguccagcacccg

SEQ ID NO: 12993 - RNA, 18 nt, Artificial Sequence
  Synthetic
cggugggguugaaccccg

SEQ ID NO: 12994 - RNA, 19 nt, Artificial Sequence
  Synthetic
acggugggguugaaccccg

SEQ ID NO: 12995 - RNA, 21 nt, Artificial Sequence
  Synthetic
ugacggugggguugaaccccg

SEQ ID NO: 12996 - RNA, 22 nt, Artificial Sequence
  Synthetic
gugacggugggguugaaccccg

SEQ ID NO: 12997 - RNA, 23 nt, Artificial Sequence
  Synthetic
ggugacggugggguugaaccccg

SEQ ID NO: 12998 - RNA, 24 nt, Artificial Sequence
  Synthetic
cggugacggugggguugaaccccg

SEQ ID NO: 12999 - RNA, 18 nt, Artificial Sequence
  Synthetic
cuggcuccgcgagggccg

SEQ ID NO: 13000 - RNA, 19 nt, Artificial Sequence
  Synthetic
gcuggcuccgcgagggccg

SEQ ID NO: 13001 - RNA, 21 nt, Artificial Sequence
  Synthetic
cggcuggcuccgcgagggccg

SEQ ID NO: 13002 - RNA, 22 nt, Artificial Sequence
  Synthetic
ccggcuggcuccgcgagggccg

SEQ ID NO: 13003 - RNA, 23 nt, Artificial Sequence
  Synthetic
cccggcuggcuccgcgagggccg

SEQ ID NO: 13004 - RNA, 24 nt, Artificial Sequence
  Synthetic
ccccggcuggcuccgcgagggccg

SEQ ID NO: 13005 - RNA, 18 nt, Artificial Sequence
  Synthetic
gccgccgacuuuccuccg

SEQ ID NO: 13006 - RNA, 19 nt, Artificial Sequence
  Synthetic
ggccgccgacuuuccuccg

SEQ ID NO: 13007 - RNA, 21 nt, Artificial Sequence
  Synthetic
cuggccgccgacuuuccuccg

SEQ ID NO: 13008 - RNA, 22 nt, Artificial Sequence
  Synthetic
ccuggccgccgacuuuccuccg

SEQ ID NO: 13009 - RNA, 23 nt, Artificial Sequence
  Synthetic
cccuggccgccgacuuuccuccg

SEQ ID NO: 13010 - RNA, 24 nt, Artificial Sequence
  Synthetic
gcccuggccgccgacuuuccuccg

SEQ ID NO: 13011 - RNA, 18 nt, Artificial Sequence
  Synthetic
ccccggcgcgcuucuccg

SEQ ID NO: 13012 - RNA, 19 nt, Artificial Sequence
  Synthetic
accccggcgcgcuucuccg

SEQ ID NO: 13013 - RNA, 21 nt, Artificial Sequence
  Synthetic
gcaccccggcgcgcuucuccg

SEQ ID NO: 13014 - RNA, 22 nt, Artificial Sequence
  Synthetic
ugcaccccggcgcgcuucuccg

SEQ ID NO: 13015 - RNA, 23 nt, Artificial Sequence
  Synthetic
gugcaccccggcgcgcuucuccg

SEQ ID NO: 13016 - RNA, 24 nt, Artificial Sequence
  Synthetic
cgugcaccccggcgcgcuucuccg

SEQ ID NO: 13017 - RNA, 18 nt, Artificial Sequence
  Synthetic
gccgcccgacccgacgcg

SEQ ID NO: 13018 - RNA, 19 nt, Artificial Sequence
  Synthetic
agccgcccgacccgacgcg

SEQ ID NO: 13019 - RNA, 21 nt, Artificial Sequence
  Synthetic
gaagccgcccgacccgacgcg

SEQ ID NO: 13020 - RNA, 22 nt, Artificial Sequence
  Synthetic
agaagccgcccgacccgacgcg

SEQ ID NO: 13021 - RNA, 23 nt, Artificial Sequence
  Synthetic
cagaagccgcccgacccgacgcg

SEQ ID NO: 13022 - RNA, 24 nt, Artificial Sequence
  Synthetic
ccagaagccgcccgacccgacgcg

SEQ ID NO: 13023 - RNA, 18 nt, Artificial Sequence
  Synthetic
gcguccauaaaccgcgcg

SEQ ID NO: 13024 - RNA, 19 nt, Artificial Sequence
  Synthetic
ggcguccauaaaccgcgcg

SEQ ID NO: 13025 - RNA, 21 nt, Artificial Sequence
  Synthetic
auggcguccauaaaccgcgcg

SEQ ID NO: 13026 - RNA, 22 nt, Artificial Sequence
  Synthetic
gauggcguccauaaaccgcgcg

SEQ ID NO: 13027 - RNA, 23 nt, Artificial Sequence
  Synthetic
ugauggcguccauaaaccgcgcg

SEQ ID NO: 13028 - RNA, 24 nt, Artificial Sequence
  Synthetic
gugauggcguccauaaaccgcgcg

SEQ ID NO: 13029 - RNA, 18 nt, Artificial Sequence
  Synthetic
guuuugccucaaacaagg

SEQ ID NO: 13030 - RNA, 19 nt, Artificial Sequence
  Synthetic
aguuuugccucaaacaagg

SEQ ID NO: 13031 - RNA, 21 nt, Artificial Sequence
  Synthetic
aaaguuuugccucaaacaagg

SEQ ID NO: 13032 - RNA, 22 nt, Artificial Sequence
  Synthetic
aaaaguuuugccucaaacaagg

SEQ ID NO: 13033 - RNA, 23 nt, Artificial Sequence
  Synthetic
uaaaaguuuugccucaaacaagg

SEQ ID NO: 13034 - RNA, 24 nt, Artificial Sequence
  Synthetic
guaaaaguuuugccucaaacaagg

SEQ ID NO: 13035 - RNA, 18 nt, Artificial Sequence
  Synthetic
gucccgacuggggcgagg

SEQ ID NO: 13036 - RNA, 19 nt, Artificial Sequence
  Synthetic
cgucccgacuggggcgagg

SEQ ID NO: 13037 - RNA, 21 nt, Artificial Sequence
  Synthetic
ugcgucccgacuggggcgagg

SEQ ID NO: 13038 - RNA, 22 nt, Artificial Sequence
  Synthetic
uugcgucccgacuggggcgagg

SEQ ID NO: 13039 - RNA, 23 nt, Artificial Sequence
  Synthetic
guugcgucccgacuggggcgagg

SEQ ID NO: 13040 - RNA, 24 nt, Artificial Sequence
  Synthetic
uguugcgucccgacuggggcgagg

SEQ ID NO: 13041 - RNA, 18 nt, Artificial Sequence
  Synthetic
cccggcgcgcuucuccgg

SEQ ID NO: 13042 - RNA, 19 nt, Artificial Sequence
  Synthetic
ccccggcgcgcuucuccgg

SEQ ID NO: 13043 - RNA, 21 nt, Artificial Sequence
  Synthetic
caccccggcgcgcuucuccgg

SEQ ID NO: 13044 - RNA, 22 nt, Artificial Sequence
  Synthetic
gcaccccggcgcgcuucuccgg

SEQ ID NO: 13045 - RNA, 23 nt, Artificial Sequence
  Synthetic
ugcaccccggcgcgcuucuccgg

SEQ ID NO: 13046 - RNA, 24 nt, Artificial Sequence
  Synthetic
gugcaccccggcgcgcuucuccgg

SEQ ID NO: 13047 - RNA, 18 nt, Artificial Sequence
  Synthetic
aagacggugacggugggg

SEQ ID NO: 13048 - RNA, 19 nt, Artificial Sequence
  Synthetic
aaagacggugacggugggg

SEQ ID NO: 13049 - RNA, 21 nt, Artificial Sequence
  Synthetic
ugaaagacggugacggugggg

SEQ ID NO: 13050 - RNA, 22 nt, Artificial Sequence
  Synthetic
gugaaagacggugacggugggg

SEQ ID NO: 13051 - RNA, 23 nt, Artificial Sequence
  Synthetic
cgugaaagacggugacggugggg

SEQ ID NO: 13052 - RNA, 24 nt, Artificial Sequence
  Synthetic
acgugaaagacggugacggugggg

SEQ ID NO: 13053 - RNA, 18 nt, Artificial Sequence
  Synthetic
uguugcgucccgacuggg

SEQ ID NO: 13054 - RNA, 19 nt, Artificial Sequence
  Synthetic
cuguugcgucccgacuggg

SEQ ID NO: 13055 - RNA, 21 nt, Artificial Sequence
  Synthetic
uucuguugcgucccgacuggg

SEQ ID NO: 13056 - RNA, 22 nt, Artificial Sequence
  Synthetic
cuucuguugcgucccgacuggg

SEQ ID NO: 13057 - RNA, 23 nt, Artificial Sequence
  Synthetic
gcuucuguugcgucccgacuggg

SEQ ID NO: 13058 - RNA, 24 nt, Artificial Sequence
  Synthetic
ggcuucuguugcgucccgacuggg

SEQ ID NO: 13059 - RNA, 18 nt, Artificial Sequence
  Synthetic
cccccccgcaguacaccu

SEQ ID NO: 13060 - RNA, 19 nt, Artificial Sequence
  Synthetic
ucccccccgcaguacaccu

SEQ ID NO: 13061 - RNA, 21 nt, Artificial Sequence
  Synthetic
cgucccccccgcaguacaccu

SEQ ID NO: 13062 - RNA, 22 nt, Artificial Sequence
  Synthetic
ucgucccccccgcaguacaccu

SEQ ID NO: 13063 - RNA, 23 nt, Artificial Sequence
  Synthetic
cucgucccccccgcaguacaccu

SEQ ID NO: 13064 - RNA, 24 nt, Artificial Sequence
  Synthetic
gcucgucccccccgcaguacaccu

SEQ ID NO: 13065 - RNA, 18 nt, Artificial Sequence
  Synthetic
cuggccgccgacuuuccu

SEQ ID NO: 13066 - RNA, 19 nt, Artificial Sequence
  Synthetic
ccuggccgccgacuuuccu

SEQ ID NO: 13067 - RNA, 21 nt, Artificial Sequence
  Synthetic
gcccuggccgccgacuuuccu

SEQ ID NO: 13068 - RNA, 22 nt, Artificial Sequence
  Synthetic
cgcccuggccgccgacuuuccu

SEQ ID NO: 13069 - RNA, 23 nt, Artificial Sequence
  Synthetic
ccgcccuggccgccgacuuuccu

SEQ ID NO: 13070 - RNA, 24 nt, Artificial Sequence
  Synthetic
gccgcccuggccgccgacuuuccu

SEQ ID NO: 13071 - RNA, 18 nt, Artificial Sequence
  Synthetic
gcaccccggcgcgcuucu

SEQ ID NO: 13072 - RNA, 19 nt, Artificial Sequence
  Synthetic
ugcaccccggcgcgcuucu

SEQ ID NO: 13073 - RNA, 21 nt, Artificial Sequence
  Synthetic
cgugcaccccggcgcgcuucu

SEQ ID NO: 13074 - RNA, 22 nt, Artificial Sequence
  Synthetic
ucgugcaccccggcgcgcuucu

SEQ ID NO: 13075 - RNA, 23 nt, Artificial Sequence
  Synthetic
gucgugcaccccggcgcgcuucu

SEQ ID NO: 13076 - RNA, 24 nt, Artificial Sequence
  Synthetic
cgucgugcaccccggcgcgcuucu

SEQ ID NO: 13077 - RNA, 18 nt, Artificial Sequence
  Synthetic
ccccccgcaguacaccuu

SEQ ID NO: 13078 - RNA, 19 nt, Artificial Sequence
  Synthetic
cccccccgcaguacaccuu

SEQ ID NO: 13079 - RNA, 21 nt, Artificial Sequence
  Synthetic
gucccccccgcaguacaccuu

SEQ ID NO: 13080 - RNA, 22 nt, Artificial Sequence
  Synthetic
cgucccccccgcaguacaccuu

SEQ ID NO: 13081 - RNA, 23 nt, Artificial Sequence
  Synthetic
ucgucccccccgcaguacaccuu

SEQ ID NO: 13082 - RNA, 24 nt, Artificial Sequence
  Synthetic
cucgucccccccgcaguacaccuu

SEQ ID NO: 13083 - RNA, 18 nt, Artificial Sequence
  Synthetic
gccccagucgggacgcaa

SEQ ID NO: 13084 - RNA, 19 nt, Artificial Sequence
  Synthetic
cgccccagucgggacgcaa

SEQ ID NO: 13085 - RNA, 21 nt, Artificial Sequence
  Synthetic
cucgccccagucgggacgcaa

SEQ ID NO: 13086 - RNA, 22 nt, Artificial Sequence
  Synthetic
ccucgccccagucgggacgcaa

SEQ ID NO: 13087 - RNA, 23 nt, Artificial Sequence
  Synthetic
accucgccccagucgggacgcaa

SEQ ID NO: 13088 - RNA, 24 nt, Artificial Sequence
  Synthetic
uaccucgccccagucgggacgcaa

SEQ ID NO: 13089 - RNA, 18 nt, Artificial Sequence
  Synthetic
ggacgcaacagaagccga

SEQ ID NO: 13090 - RNA, 19 nt, Artificial Sequence
  Synthetic
gggacgcaacagaagccga

SEQ ID NO: 13091 - RNA, 21 nt, Artificial Sequence
  Synthetic
ucgggacgcaacagaagccga

SEQ ID NO: 13092 - RNA, 22 nt, Artificial Sequence
  Synthetic
gucgggacgcaacagaagccga

SEQ ID NO: 13093 - RNA, 23 nt, Artificial Sequence
  Synthetic
agucgggacgcaacagaagccga

SEQ ID NO: 13094 - RNA, 24 nt, Artificial Sequence
  Synthetic
cagucgggacgcaacagaagccga

SEQ ID NO: 13095 - RNA, 18 nt, Artificial Sequence
  Synthetic
uacgacauccuggagaac

SEQ ID NO: 13096 - RNA, 19 nt, Artificial Sequence
  Synthetic
guacgacauccuggagaac

SEQ ID NO: 13097 - RNA, 21 nt, Artificial Sequence
  Synthetic
guguacgacauccuggagaac

SEQ ID NO: 13098 - RNA, 22 nt, Artificial Sequence
  Synthetic
cguguacgacauccuggagaac

SEQ ID NO: 13099 - RNA, 23 nt, Artificial Sequence
  Synthetic
acguguacgacauccuggagaac

SEQ ID NO: 13100 - RNA, 24 nt, Artificial Sequence
  Synthetic
cacguguacgacauccuggagaac

SEQ ID NO: 13101 - RNA, 18 nt, Artificial Sequence
  Synthetic
uggacgaggaugcccccc

SEQ ID NO: 13102 - RNA, 19 nt, Artificial Sequence
  Synthetic
cuggacgaggaugcccccc

SEQ ID NO: 13103 - RNA, 21 nt, Artificial Sequence
  Synthetic
ugcuggacgaggaugcccccc

SEQ ID NO: 13104 - RNA, 22 nt, Artificial Sequence
  Synthetic
gugcuggacgaggaugcccccc

SEQ ID NO: 13105 - RNA, 23 nt, Artificial Sequence
  Synthetic
ggugcuggacgaggaugcccccc

SEQ ID NO: 13106 - RNA, 24 nt, Artificial Sequence
  Synthetic
gggugcuggacgaggaugcccccc

SEQ ID NO: 13107 - RNA, 18 nt, Artificial Sequence
  Synthetic
cuggacgaggaugccccc

SEQ ID NO: 13108 - RNA, 19 nt, Artificial Sequence
  Synthetic
gcuggacgaggaugccccc

SEQ ID NO: 13109 - RNA, 21 nt, Artificial Sequence
  Synthetic
gugcuggacgaggaugccccc

SEQ ID NO: 13110 - RNA, 22 nt, Artificial Sequence
  Synthetic
ggugcuggacgaggaugccccc

SEQ ID NO: 13111 - RNA, 23 nt, Artificial Sequence
  Synthetic
gggugcuggacgaggaugccccc

SEQ ID NO: 13112 - RNA, 24 nt, Artificial Sequence
  Synthetic
cgggugcuggacgaggaugccccc

SEQ ID NO: 13113 - RNA, 18 nt, Artificial Sequence
  Synthetic
cggcggcccgcugucccc

SEQ ID NO: 13114 - RNA, 19 nt, Artificial Sequence
  Synthetic
gcggcggcccgcugucccc

SEQ ID NO: 13115 - RNA, 21 nt, Artificial Sequence
  Synthetic
uggcggcggcccgcugucccc

SEQ ID NO: 13116 - RNA, 22 nt, Artificial Sequence
  Synthetic
guggcggcggcccgcugucccc

SEQ ID NO: 13117 - RNA, 23 nt, Artificial Sequence
  Synthetic
gguggcggcggcccgcugucccc

SEQ ID NO: 13118 - RNA, 24 nt, Artificial Sequence
  Synthetic
cgguggcggcggcccgcugucccc

SEQ ID NO: 13119 - RNA, 18 nt, Artificial Sequence
  Synthetic
gcggcggcccgcuguccc

SEQ ID NO: 13120 - RNA, 19 nt, Artificial Sequence
  Synthetic
ggcggcggcccgcuguccc

SEQ ID NO: 13121 - RNA, 21 nt, Artificial Sequence
  Synthetic
guggcggcggcccgcuguccc

SEQ ID NO: 13122 - RNA, 22 nt, Artificial Sequence
  Synthetic
gguggcggcggcccgcuguccc

SEQ ID NO: 13123 - RNA, 23 nt, Artificial Sequence
  Synthetic
cgguggcggcggcccgcuguccc

SEQ ID NO: 13124 - RNA, 24 nt, Artificial Sequence
  Synthetic
ccgguggcggcggcccgcuguccc

SEQ ID NO: 13125 - RNA, 18 nt, Artificial Sequence
  Synthetic
gcccucgcggagccagcc

SEQ ID NO: 13126 - RNA, 19 nt, Artificial Sequence
  Synthetic
ggcccucgcggagccagcc

SEQ ID NO: 13127 - RNA, 21 nt, Artificial Sequence
  Synthetic
ccggcccucgcggagccagcc

SEQ ID NO: 13128 - RNA, 22 nt, Artificial Sequence
  Synthetic
gccggcccucgcggagccagcc

SEQ ID NO: 13129 - RNA, 23 nt, Artificial Sequence
  Synthetic
cgccggcccucgcggagccagcc

SEQ ID NO: 13130 - RNA, 24 nt, Artificial Sequence
  Synthetic
ccgccggcccucgcggagccagcc

SEQ ID NO: 13131 - RNA, 18 nt, Artificial Sequence
  Synthetic
uucacguguacgacaucc

SEQ ID NO: 13132 - RNA, 19 nt, Artificial Sequence
  Synthetic
uuucacguguacgacaucc

SEQ ID NO: 13133 - RNA, 21 nt, Artificial Sequence
  Synthetic
ucuuucacguguacgacaucc

SEQ ID NO: 13134 - RNA, 22 nt, Artificial Sequence
  Synthetic
gucuuucacguguacgacaucc

SEQ ID NO: 13135 - RNA, 23 nt, Artificial Sequence
  Synthetic
cgucuuucacguguacgacaucc

SEQ ID NO: 13136 - RNA, 24 nt, Artificial Sequence
  Synthetic
ccgucuuucacguguacgacaucc

SEQ ID NO: 13137 - RNA, 18 nt, Artificial Sequence
  Synthetic
ggcccucgcggagccagc

SEQ ID NO: 13138 - RNA, 19 nt, Artificial Sequence
  Synthetic
cggcccucgcggagccagc

SEQ ID NO: 13139 - RNA, 21 nt, Artificial Sequence
  Synthetic
gccggcccucgcggagccagc

SEQ ID NO: 13140 - RNA, 22 nt, Artificial Sequence
  Synthetic
cgccggcccucgcggagccagc

SEQ ID NO: 13141 - RNA, 23 nt, Artificial Sequence
  Synthetic
ccgccggcccucgcggagccagc

SEQ ID NO: 13142 - RNA, 24 nt, Artificial Sequence
  Synthetic
cccgccggcccucgcggagccagc

SEQ ID NO: 13143 - RNA, 18 nt, Artificial Sequence
  Synthetic
cggaggaaagucggcggc

SEQ ID NO: 13144 - RNA, 19 nt, Artificial Sequence
  Synthetic
ccggaggaaagucggcggc

SEQ ID NO: 13145 - RNA, 21 nt, Artificial Sequence
  Synthetic
ccccggaggaaagucggcggc

SEQ ID NO: 13146 - RNA, 22 nt, Artificial Sequence
  Synthetic
cccccggaggaaagucggcggc

SEQ ID NO: 13147 - RNA, 23 nt, Artificial Sequence
  Synthetic
ucccccggaggaaagucggcggc

SEQ ID NO: 13148 - RNA, 24 nt, Artificial Sequence
  Synthetic
gucccccggaggaaagucggcggc

SEQ ID NO: 13149 - RNA, 18 nt, Artificial Sequence
  Synthetic
ucgcgccuguggggcggc

SEQ ID NO: 13150 - RNA, 19 nt, Artificial Sequence
  Synthetic
cucgcgccuguggggcggc

SEQ ID NO: 13151 - RNA, 21 nt, Artificial Sequence
  Synthetic
cgcucgcgccuguggggcggc

SEQ ID NO: 13152 - RNA, 22 nt, Artificial Sequence
  Synthetic
gcgcucgcgccuguggggcggc

SEQ ID NO: 13153 - RNA, 23 nt, Artificial Sequence
  Synthetic
ggcgcucgcgccuguggggcggc

SEQ ID NO: 13154 - RNA, 24 nt, Artificial Sequence
  Synthetic
cggcgcucgcgccuguggggcggc

SEQ ID NO: 13155 - RNA, 18 nt, Artificial Sequence
  Synthetic
gcccccaagguguacugc

SEQ ID NO: 13156 - RNA, 19 nt, Artificial Sequence
  Synthetic
cgcccccaagguguacugc

SEQ ID NO: 13157 - RNA, 21 nt, Artificial Sequence
  Synthetic
cgcgcccccaagguguacugc

SEQ ID NO: 13158 - RNA, 22 nt, Artificial Sequence
  Synthetic
gcgcgcccccaagguguacugc

SEQ ID NO: 13159 - RNA, 23 nt, Artificial Sequence
  Synthetic
agcgcgcccccaagguguacugc

SEQ ID NO: 13160 - RNA, 24 nt, Artificial Sequence
  Synthetic
aagcgcgcccccaagguguacugc

SEQ ID NO: 13161 - RNA, 18 nt, Artificial Sequence
  Synthetic
uuucacguguacgacauc

SEQ ID NO: 13162 - RNA, 19 nt, Artificial Sequence
  Synthetic
cuuucacguguacgacauc

SEQ ID NO: 13163 - RNA, 21 nt, Artificial Sequence
  Synthetic
gucuuucacguguacgacauc

SEQ ID NO: 13164 - RNA, 22 nt, Artificial Sequence
  Synthetic
cgucuuucacguguacgacauc

SEQ ID NO: 13165 - RNA, 23 nt, Artificial Sequence
  Synthetic
ccgucuuucacguguacgacauc

SEQ ID NO: 13166 - RNA, 24 nt, Artificial Sequence
  Synthetic
accgucuuucacguguacgacauc

SEQ ID NO: 13167 - RNA, 18 nt, Artificial Sequence
  Synthetic
uugcgcccgccggcccuc

SEQ ID NO: 13168 - RNA, 19 nt, Artificial Sequence
  Synthetic
uuugcgcccgccggcccuc

SEQ ID NO: 13169 - RNA, 21 nt, Artificial Sequence
  Synthetic
uuuuugcgcccgccggcccuc

SEQ ID NO: 13170 - RNA, 22 nt, Artificial Sequence
  Synthetic
uuuuuugcgcccgccggcccuc

SEQ ID NO: 13171 - RNA, 23 nt, Artificial Sequence
  Synthetic
guuuuuugcgcccgccggcccuc

SEQ ID NO: 13172 - RNA, 24 nt, Artificial Sequence
  Synthetic
gguuuuuugcgcccgccggcccuc

SEQ ID NO: 13173 - RNA, 18 nt, Artificial Sequence
  Synthetic
accccuaccucgccccag

SEQ ID NO: 13174 - RNA, 19 nt, Artificial Sequence
  Synthetic
aaccccuaccucgccccag

SEQ ID NO: 13175 - RNA, 21 nt, Artificial Sequence
  Synthetic
acaaccccuaccucgccccag

SEQ ID NO: 13176 - RNA, 22 nt, Artificial Sequence
  Synthetic
uacaaccccuaccucgccccag

SEQ ID NO: 13177 - RNA, 23 nt, Artificial Sequence
  Synthetic
uuacaaccccuaccucgccccag

SEQ ID NO: 13178 - RNA, 24 nt, Artificial Sequence
  Synthetic
uuuacaaccccuaccucgccccag

SEQ ID NO: 13179 - RNA, 18 nt, Artificial Sequence
  Synthetic
cggcccucgcggagccag

SEQ ID NO: 13180 - RNA, 19 nt, Artificial Sequence
  Synthetic
ccggcccucgcggagccag

SEQ ID NO: 13181 - RNA, 21 nt, Artificial Sequence
  Synthetic
cgccggcccucgcggagccag

SEQ ID NO: 13182 - RNA, 22 nt, Artificial Sequence
  Synthetic
ccgccggcccucgcggagccag

SEQ ID NO: 13183 - RNA, 23 nt, Artificial Sequence
  Synthetic
cccgccggcccucgcggagccag

SEQ ID NO: 13184 - RNA, 24 nt, Artificial Sequence
  Synthetic
gcccgccggcccucgcggagccag

SEQ ID NO: 13185 - RNA, 18 nt, Artificial Sequence
  Synthetic
acgacauccuggagaacg

SEQ ID NO: 13186 - RNA, 19 nt, Artificial Sequence
  Synthetic
uacgacauccuggagaacg

SEQ ID NO: 13187 - RNA, 21 nt, Artificial Sequence
  Synthetic
uguacgacauccuggagaacg

SEQ ID NO: 13188 - RNA, 22 nt, Artificial Sequence
  Synthetic
guguacgacauccuggagaacg

SEQ ID NO: 13189 - RNA, 23 nt, Artificial Sequence
  Synthetic
cguguacgacauccuggagaacg

SEQ ID NO: 13190 - RNA, 24 nt, Artificial Sequence
  Synthetic
acguguacgacauccuggagaacg

SEQ ID NO: 13191 - RNA, 18 nt, Artificial Sequence
  Synthetic
gacgaggaugcccccccg

SEQ ID NO: 13192 - RNA, 19 nt, Artificial Sequence
  Synthetic
ggacgaggaugcccccccg

SEQ ID NO: 13193 - RNA, 21 nt, Artificial Sequence
  Synthetic
cuggacgaggaugcccccccg

SEQ ID NO: 13194 - RNA, 22 nt, Artificial Sequence
  Synthetic
gcuggacgaggaugcccccccg

SEQ ID NO: 13195 - RNA, 23 nt, Artificial Sequence
  Synthetic
ugcuggacgaggaugcccccccg

SEQ ID NO: 13196 - RNA, 24 nt, Artificial Sequence
  Synthetic
gugcuggacgaggaugcccccccg

SEQ ID NO: 13197 - RNA, 18 nt, Artificial Sequence
  Synthetic
gcggcccgcugucccccg

SEQ ID NO: 13198 - RNA, 19 nt, Artificial Sequence
  Synthetic
ggcggcccgcugucccccg

SEQ ID NO: 13199 - RNA, 21 nt, Artificial Sequence
  Synthetic
gcggcggcccgcugucccccg

SEQ ID NO: 13200 - RNA, 22 nt, Artificial Sequence
  Synthetic
ggcggcggcccgcugucccccg

SEQ ID NO: 13201 - RNA, 23 nt, Artificial Sequence
  Synthetic
uggcggcggcccgcugucccccg

SEQ ID NO: 13202 - RNA, 24 nt, Artificial Sequence
  Synthetic
guggcggcggcccgcugucccccg

SEQ ID NO: 13203 - RNA, 18 nt, Artificial Sequence
  Synthetic
ggcguggaccacgccccg

SEQ ID NO: 13204 - RNA, 19 nt, Artificial Sequence
  Synthetic
cggcguggaccacgccccg

SEQ ID NO: 13205 - RNA, 21 nt, Artificial Sequence
  Synthetic
ggcggcguggaccacgccccg

SEQ ID NO: 13206 - RNA, 22 nt, Artificial Sequence
  Synthetic
gggcggcguggaccacgccccg

SEQ ID NO: 13207 - RNA, 23 nt, Artificial Sequence
  Synthetic
ggggcggcguggaccacgccccg

SEQ ID NO: 13208 - RNA, 24 nt, Artificial Sequence
  Synthetic
uggggcggcguggaccacgccccg

SEQ ID NO: 13209 - RNA, 18 nt, Artificial Sequence
  Synthetic
cccccccggagaagcgcg

SEQ ID NO: 13210 - RNA, 19 nt, Artificial Sequence
  Synthetic
gcccccccggagaagcgcg

SEQ ID NO: 13211 - RNA, 21 nt, Artificial Sequence
  Synthetic
augcccccccggagaagcgcg

SEQ ID NO: 13212 - RNA, 22 nt, Artificial Sequence
  Synthetic
gaugcccccccggagaagcgcg

SEQ ID NO: 13213 - RNA, 23 nt, Artificial Sequence
  Synthetic
ggaugcccccccggagaagcgcg

SEQ ID NO: 13214 - RNA, 24 nt, Artificial Sequence
  Synthetic
aggaugcccccccggagaagcgcg

SEQ ID NO: 13215 - RNA, 18 nt, Artificial Sequence
  Synthetic
cccccaagguguacugcg

SEQ ID NO: 13216 - RNA, 19 nt, Artificial Sequence
  Synthetic
gcccccaagguguacugcg

SEQ ID NO: 13217 - RNA, 21 nt, Artificial Sequence
  Synthetic
gcgcccccaagguguacugcg

SEQ ID NO: 13218 - RNA, 22 nt, Artificial Sequence
  Synthetic
cgcgcccccaagguguacugcg

SEQ ID NO: 13219 - RNA, 23 nt, Artificial Sequence
  Synthetic
gcgcgcccccaagguguacugcg

SEQ ID NO: 13220 - RNA, 24 nt, Artificial Sequence
  Synthetic
agcgcgcccccaagguguacugcg

SEQ ID NO: 13221 - RNA, 18 nt, Artificial Sequence
  Synthetic
ugcgcccgccggcccucg

SEQ ID NO: 13222 - RNA, 19 nt, Artificial Sequence
  Synthetic
uugcgcccgccggcccucg

SEQ ID NO: 13223 - RNA, 21 nt, Artificial Sequence
  Synthetic
uuuugcgcccgccggcccucg

SEQ ID NO: 13224 - RNA, 22 nt, Artificial Sequence
  Synthetic
uuuuugcgcccgccggcccucg

SEQ ID NO: 13225 - RNA, 23 nt, Artificial Sequence
  Synthetic
uuuuuugcgcccgccggcccucg

SEQ ID NO: 13226 - RNA, 24 nt, Artificial Sequence
  Synthetic
guuuuuugcgcccgccggcccucg

SEQ ID NO: 13227 - RNA, 18 nt, Artificial Sequence
  Synthetic
cggcccgcugucccccgg

SEQ ID NO: 13228 - RNA, 19 nt, Artificial Sequence
  Synthetic
gcggcccgcugucccccgg

SEQ ID NO: 13229 - RNA, 21 nt, Artificial Sequence
  Synthetic
cggcggcccgcugucccccgg

SEQ ID NO: 13230 - RNA, 22 nt, Artificial Sequence
  Synthetic
gcggcggcccgcugucccccgg

SEQ ID NO: 13231 - RNA, 23 nt, Artificial Sequence
  Synthetic
ggcggcggcccgcugucccccgg

SEQ ID NO: 13232 - RNA, 24 nt, Artificial Sequence
  Synthetic
uggcggcggcccgcugucccccgg

SEQ ID NO: 13233 - RNA, 18 nt, Artificial Sequence
  Synthetic
ccccaagguguacugcgg

SEQ ID NO: 13234 - RNA, 19 nt, Artificial Sequence
  Synthetic
cccccaagguguacugcgg

SEQ ID NO: 13235 - RNA, 21 nt, Artificial Sequence
  Synthetic
cgcccccaagguguacugcgg

SEQ ID NO: 13236 - RNA, 22 nt, Artificial Sequence
  Synthetic
gcgcccccaagguguacugcgg

SEQ ID NO: 13237 - RNA, 23 nt, Artificial Sequence
  Synthetic
cgcgcccccaagguguacugcgg

SEQ ID NO: 13238 - RNA, 24 nt, Artificial Sequence
  Synthetic
gcgcgcccccaagguguacugcgg

SEQ ID NO: 13239 - RNA, 18 nt, Artificial Sequence
  Synthetic
cccaagguguacugcggg

SEQ ID NO: 13240 - RNA, 19 nt, Artificial Sequence
  Synthetic
ccccaagguguacugcggg

SEQ ID NO: 13241 - RNA, 21 nt, Artificial Sequence
  Synthetic
gcccccaagguguacugcggg

SEQ ID NO: 13242 - RNA, 22 nt, Artificial Sequence
  Synthetic
cgcccccaagguguacugcggg

SEQ ID NO: 13243 - RNA, 23 nt, Artificial Sequence
  Synthetic
gcgcccccaagguguacugcggg

SEQ ID NO: 13244 - RNA, 24 nt, Artificial Sequence
  Synthetic
cgcgcccccaagguguacugcggg

SEQ ID NO: 13245 - RNA, 18 nt, Artificial Sequence
  Synthetic
gacguccuccgcgucggg

SEQ ID NO: 13246 - RNA, 19 nt, Artificial Sequence
  Synthetic
cgacguccuccgcgucggg

SEQ ID NO: 13247 - RNA, 21 nt, Artificial Sequence
  Synthetic
cgcgacguccuccgcgucggg

SEQ ID NO: 13248 - RNA, 22 nt, Artificial Sequence
  Synthetic
gcgcgacguccuccgcgucggg

SEQ ID NO: 13249 - RNA, 23 nt, Artificial Sequence
  Synthetic
agcgcgacguccuccgcgucggg

SEQ ID NO: 13250 - RNA, 24 nt, Artificial Sequence
  Synthetic
gagcgcgacguccuccgcgucggg

SEQ ID NO: 13251 - RNA, 18 nt, Artificial Sequence
  Synthetic
agguguacugcggggggg

SEQ ID NO: 13252 - RNA, 19 nt, Artificial Sequence
  Synthetic
aagguguacugcggggggg

SEQ ID NO: 13253 - RNA, 21 nt, Artificial Sequence
  Synthetic
ccaagguguacugcggggggg

SEQ ID NO: 13254 - RNA, 22 nt, Artificial Sequence
  Synthetic
cccaagguguacugcggggggg

SEQ ID NO: 13255 - RNA, 23 nt, Artificial Sequence
  Synthetic
ccccaagguguacugcggggggg

SEQ ID NO: 13256 - RNA, 24 nt, Artificial Sequence
  Synthetic
cccccaagguguacugcggggggg

SEQ ID NO: 13257 - RNA, 18 nt, Artificial Sequence
  Synthetic
ucgccccgcgggugcugg

SEQ ID NO: 13258 - RNA, 19 nt, Artificial Sequence
  Synthetic
aucgccccgcgggugcugg

SEQ ID NO: 13259 - RNA, 21 nt, Artificial Sequence
  Synthetic
ucaucgccccgcgggugcugg

SEQ ID NO: 13260 - RNA, 22 nt, Artificial Sequence
  Synthetic
uucaucgccccgcgggugcugg

SEQ ID NO: 13261 - RNA, 23 nt, Artificial Sequence
  Synthetic
auucaucgccccgcgggugcugg

SEQ ID NO: 13262 - RNA, 24 nt, Artificial Sequence
  Synthetic
gauucaucgccccgcgggugcugg

SEQ ID NO: 13263 - RNA, 18 nt, Artificial Sequence
  Synthetic
cgcccccaagguguacug

SEQ ID NO: 13264 - RNA, 19 nt, Artificial Sequence
  Synthetic
gcgcccccaagguguacug

SEQ ID NO: 13265 - RNA, 21 nt, Artificial Sequence
  Synthetic
gcgcgcccccaagguguacug

SEQ ID NO: 13266 - RNA, 22 nt, Artificial Sequence
  Synthetic
agcgcgcccccaagguguacug

SEQ ID NO: 13267 - RNA, 23 nt, Artificial Sequence
  Synthetic
aagcgcgcccccaagguguacug

SEQ ID NO: 13268 - RNA, 24 nt, Artificial Sequence
  Synthetic
caagcgcgcccccaagguguacug

SEQ ID NO: 13269 - RNA, 18 nt, Artificial Sequence
  Synthetic
ccgcggcgcucgcgccug

SEQ ID NO: 13270 - RNA, 19 nt, Artificial Sequence
  Synthetic
gccgcggcgcucgcgccug

SEQ ID NO: 13271 - RNA, 21 nt, Artificial Sequence
  Synthetic
uggccgcggcgcucgcgccug

SEQ ID NO: 13272 - RNA, 22 nt, Artificial Sequence
  Synthetic
cuggccgcggcgcucgcgccug

SEQ ID NO: 13273 - RNA, 23 nt, Artificial Sequence
  Synthetic
ucuggccgcggcgcucgcgccug

SEQ ID NO: 13274 - RNA, 24 nt, Artificial Sequence
  Synthetic
uucuggccgcggcgcucgcgccug

SEQ ID NO: 13275 - RNA, 18 nt, Artificial Sequence
  Synthetic
cacguguacgacauccug

SEQ ID NO: 13276 - RNA, 19 nt, Artificial Sequence
  Synthetic
ucacguguacgacauccug

SEQ ID NO: 13277 - RNA, 21 nt, Artificial Sequence
  Synthetic
uuucacguguacgacauccug

SEQ ID NO: 13278 - RNA, 22 nt, Artificial Sequence
  Synthetic
cuuucacguguacgacauccug

SEQ ID NO: 13279 - RNA, 23 nt, Artificial Sequence
  Synthetic
ucuuucacguguacgacauccug

SEQ ID NO: 13280 - RNA, 24 nt, Artificial Sequence
  Synthetic
gucuuucacguguacgacauccug

SEQ ID NO: 13281 - RNA, 18 nt, Artificial Sequence
  Synthetic
uucaucgccccgcgggug

SEQ ID NO: 13282 - RNA, 19 nt, Artificial Sequence
  Synthetic
auucaucgccccgcgggug

SEQ ID NO: 13283 - RNA, 21 nt, Artificial Sequence
  Synthetic
cgauucaucgccccgcgggug

SEQ ID NO: 13284 - RNA, 22 nt, Artificial Sequence
  Synthetic
ucgauucaucgccccgcgggug

SEQ ID NO: 13285 - RNA, 23 nt, Artificial Sequence
  Synthetic
uucgauucaucgccccgcgggug

SEQ ID NO: 13286 - RNA, 24 nt, Artificial Sequence
  Synthetic
uuucgauucaucgccccgcgggug

SEQ ID NO: 13287 - RNA, 18 nt, Artificial Sequence
  Synthetic
gcgcccccaagguguacu

SEQ ID NO: 13288 - RNA, 19 nt, Artificial Sequence
  Synthetic
cgcgcccccaagguguacu

SEQ ID NO: 13289 - RNA, 21 nt, Artificial Sequence
  Synthetic
agcgcgcccccaagguguacu

SEQ ID NO: 13290 - RNA, 22 nt, Artificial Sequence
  Synthetic
aagcgcgcccccaagguguacu

SEQ ID NO: 13291 - RNA, 23 nt, Artificial Sequence
  Synthetic
caagcgcgcccccaagguguacu

SEQ ID NO: 13292 - RNA, 24 nt, Artificial Sequence
  Synthetic
ucaagcgcgcccccaagguguacu

SEQ ID NO: 13293 - RNA, 18 nt, Artificial Sequence
  Synthetic
gccgcggcgcucgcgccu

SEQ ID NO: 13294 - RNA, 19 nt, Artificial Sequence
  Synthetic
ggccgcggcgcucgcgccu

SEQ ID NO: 13295 - RNA, 21 nt, Artificial Sequence
  Synthetic
cuggccgcggcgcucgcgccu

SEQ ID NO: 13296 - RNA, 22 nt, Artificial Sequence
  Synthetic
ucuggccgcggcgcucgcgccu

SEQ ID NO: 13297 - RNA, 23 nt, Artificial Sequence
  Synthetic
uucuggccgcggcgcucgcgccu

SEQ ID NO: 13298 - RNA, 24 nt, Artificial Sequence
  Synthetic
cuucuggccgcggcgcucgcgccu

SEQ ID NO: 13299 - RNA, 18 nt, Artificial Sequence
  Synthetic
ccccuaccucgccccagu

SEQ ID NO: 13300 - RNA, 19 nt, Artificial Sequence
  Synthetic
accccuaccucgccccagu

SEQ ID NO: 13301 - RNA, 21 nt, Artificial Sequence
  Synthetic
caaccccuaccucgccccagu

SEQ ID NO: 13302 - RNA, 22 nt, Artificial Sequence
  Synthetic
acaaccccuaccucgccccagu

SEQ ID NO: 13303 - RNA, 23 nt, Artificial Sequence
  Synthetic
uacaaccccuaccucgccccagu

SEQ ID NO: 13304 - RNA, 24 nt, Artificial Sequence
  Synthetic
uuacaaccccuaccucgccccagu

SEQ ID NO: 13305 - RNA, 18 nt, Artificial Sequence
  Synthetic
cggggacccccgccuugu

SEQ ID NO: 13306 - RNA, 19 nt, Artificial Sequence
  Synthetic
ccggggacccccgccuugu

SEQ ID NO: 13307 - RNA, 21 nt, Artificial Sequence
  Synthetic
agccggggacccccgccuugu

SEQ ID NO: 13308 - RNA, 22 nt, Artificial Sequence
  Synthetic
cagccggggacccccgccuugu

SEQ ID NO: 13309 - RNA, 23 nt, Artificial Sequence
  Synthetic
ccagccggggacccccgccuugu

SEQ ID NO: 13310 - RNA, 24 nt, Artificial Sequence
  Synthetic
gccagccggggacccccgccuugu

SEQ ID NO: 13311 - RNA, 18 nt, Artificial Sequence
  Synthetic
caguuccacgcgcgguuu

SEQ ID NO: 13312 - RNA, 19 nt, Artificial Sequence
  Synthetic
ccaguuccacgcgcgguuu

SEQ ID NO: 13313 - RNA, 20 nt, Artificial Sequence
  Synthetic
cccaguuccacgcgcgguuu

SEQ ID NO: 13314 - RNA, 21 nt, Artificial Sequence
  Synthetic
gcccaguuccacgcgcgguuu

SEQ ID NO: 13315 - RNA, 22 nt, Artificial Sequence
  Synthetic
ggcccaguuccacgcgcgguuu

SEQ ID NO: 13316 - RNA, 23 nt, Artificial Sequence
  Synthetic
cggcccaguuccacgcgcgguuu

SEQ ID NO: 13317 - RNA, 24 nt, Artificial Sequence
  Synthetic
gcggcccaguuccacgcgcgguuu

SEQ ID NO: 13318 - RNA, 18 nt, Artificial Sequence
  Synthetic
gggguuguccaggaugaa

SEQ ID NO: 13319 - RNA, 24 nt, Artificial Sequence
  Synthetic
gaacccgggguuguccaggaugaa

SEQ ID NO: 13320 - RNA, 21 nt, Artificial Sequence
  Synthetic
gcacucccgugaacccguaca

SEQ ID NO: 13321 - RNA, 24 nt, Artificial Sequence
  Synthetic
gcugcacucccgugaacccguaca

SEQ ID NO: 13322 - RNA, 19 nt, Artificial Sequence
  Synthetic
gcaaagucgaacaccacca

SEQ ID NO: 13323 - RNA, 23 nt, Artificial Sequence
  Synthetic
gcuggcaaagucgaacaccacca

SEQ ID NO: 13324 - RNA, 24 nt, Artificial Sequence
  Synthetic
ggcuggcaaagucgaacaccacca

SEQ ID NO: 13325 - RNA, 22 nt, Artificial Sequence
  Synthetic
guguccccguagaugaugcgca

SEQ ID NO: 13326 - RNA, 21 nt, Artificial Sequence
  Synthetic
ggccgcggcacagcacaaaga

SEQ ID NO: 13327 - RNA, 23 nt, Artificial Sequence
  Synthetic
gaggccgcggcacagcacaaaga

SEQ ID NO: 13328 - RNA, 18 nt, Artificial Sequence
  Synthetic
gacaggucguagagcaga

SEQ ID NO: 13329 - RNA, 19 nt, Artificial Sequence
  Synthetic
ggacaggucguagagcaga

SEQ ID NO: 13330 - RNA, 21 nt, Artificial Sequence
  Synthetic
guggacaggucguagagcaga

SEQ ID NO: 13331 - RNA, 22 nt, Artificial Sequence
  Synthetic
gguggacaggucguagagcaga

SEQ ID NO: 13332 - RNA, 24 nt, Artificial Sequence
  Synthetic
gugguggacaggucguagagcaga

SEQ ID NO: 13333 - RNA, 18 nt, Artificial Sequence
  Synthetic
gcucuggggaauccgcga

SEQ ID NO: 13334 - RNA, 21 nt, Artificial Sequence
  Synthetic
gcugcucuggggaauccgcga

SEQ ID NO: 13335 - RNA, 22 nt, Artificial Sequence
  Synthetic
ggcugcucuggggaauccgcga

SEQ ID NO: 13336 - RNA, 23 nt, Artificial Sequence
  Synthetic
gggcugcucuggggaauccgcga

SEQ ID NO: 13337 - RNA, 24 nt, Artificial Sequence
  Synthetic
ggggcugcucuggggaauccgcga

SEQ ID NO: 13338 - RNA, 21 nt, Artificial Sequence
  Synthetic
ggucugggccacgaucacgua

SEQ ID NO: 13339 - RNA, 22 nt, Artificial Sequence
  Synthetic
gggucugggccacgaucacgua

SEQ ID NO: 13340 - RNA, 24 nt, Artificial Sequence
  Synthetic
gcgggucugggccacgaucacgua

SEQ ID NO: 13341 - RNA, 18 nt, Artificial Sequence
  Synthetic
gugaacgucuuuucgcac

SEQ ID NO: 13342 - RNA, 19 nt, Artificial Sequence
  Synthetic
ggugaacgucuuuucgcac

SEQ ID NO: 13343 - RNA, 23 nt, Artificial Sequence
  Synthetic
gcuuggugaacgucuuuucgcac

SEQ ID NO: 13344 - RNA, 18 nt, Artificial Sequence
  Synthetic
ggggccguacuguuucac

SEQ ID NO: 13345 - RNA, 24 nt, Artificial Sequence
  Synthetic
gaacucggggccguacuguuucac

SEQ ID NO: 13346 - RNA, 19 nt, Artificial Sequence
  Synthetic
gcagcaggcacguaaagac

SEQ ID NO: 13347 - RNA, 21 nt, Artificial Sequence
  Synthetic
gcgcagcaggcacguaaagac

SEQ ID NO: 13348 - RNA, 22 nt, Artificial Sequence
  Synthetic
ggcgcagcaggcacguaaagac

SEQ ID NO: 13349 - RNA, 23 nt, Artificial Sequence
  Synthetic
guaccagccgaaggugacgaacc

SEQ ID NO: 13350 - RNA, 24 nt, Artificial Sequence
  Synthetic
gguaccagccgaaggugacgaacc

SEQ ID NO: 13351 - RNA, 18 nt, Artificial Sequence
  Synthetic
ggcgccccuaaaucgccc

SEQ ID NO: 13352 - RNA, 19 nt, Artificial Sequence
  Synthetic
guuauucccaaacagggcc

SEQ ID NO: 13353 - RNA, 21 nt, Artificial Sequence
  Synthetic
gcguuauucccaaacagggcc

SEQ ID NO: 13354 - RNA, 22 nt, Artificial Sequence
  Synthetic
ggcguuauucccaaacagggcc

SEQ ID NO: 13355 - RNA, 18 nt, Artificial Sequence
  Synthetic
gcuuguugguguacgcgc

SEQ ID NO: 13356 - RNA, 21 nt, Artificial Sequence
  Synthetic
ggcgcuuguugguguacgcgc

SEQ ID NO: 13357 - RNA, 19 nt, Artificial Sequence
  Synthetic
gcccggcggcguaguaggc

SEQ ID NO: 13358 - RNA, 21 nt, Artificial Sequence
  Synthetic
gggcccggcggcguaguaggc

SEQ ID NO: 13359 - RNA, 23 nt, Artificial Sequence
  Synthetic
gcgggcccggcggcguaguaggc

SEQ ID NO: 13360 - RNA, 18 nt, Artificial Sequence
  Synthetic
gcaacgugcaggcacggc

SEQ ID NO: 13361 - RNA, 19 nt, Artificial Sequence
  Synthetic
ggcaacgugcaggcacggc

SEQ ID NO: 13362 - RNA, 21 nt, Artificial Sequence
  Synthetic
gcggcaacgugcaggcacggc

SEQ ID NO: 13363 - RNA, 24 nt, Artificial Sequence
  Synthetic
gucgcggcaacgugcaggcacggc

SEQ ID NO: 13364 - RNA, 18 nt, Artificial Sequence
  Synthetic
gccugcagucccucgggc

SEQ ID NO: 13365 - RNA, 22 nt, Artificial Sequence
  Synthetic
gaacgccugcagucccucgggc

SEQ ID NO: 13366 - RNA, 18 nt, Artificial Sequence
  Synthetic
gaagcacagguugugggc

SEQ ID NO: 13367 - RNA, 21 nt, Artificial Sequence
  Synthetic
gcugaagcacagguugugggc

SEQ ID NO: 13368 - RNA, 23 nt, Artificial Sequence
  Synthetic
gugcugaagcacagguugugggc

SEQ ID NO: 13369 - RNA, 21 nt, Artificial Sequence
  Synthetic
gguugugggccuggaugaugc

SEQ ID NO: 13370 - RNA, 21 nt, Artificial Sequence
  Synthetic
gucaugaaggccaacagcauc

SEQ ID NO: 13371 - RNA, 22 nt, Artificial Sequence
  Synthetic
ggucaugaaggccaacagcauc

SEQ ID NO: 13372 - RNA, 23 nt, Artificial Sequence
  Synthetic
gggucaugaaggccaacagcauc

SEQ ID NO: 13373 - RNA, 18 nt, Artificial Sequence
  Synthetic
gcgcgcguggacguacuc

SEQ ID NO: 13374 - RNA, 23 nt, Artificial Sequence
  Synthetic
gcccagcgcgcguggacguacuc

SEQ ID NO: 13375 - RNA, 18 nt, Artificial Sequence
  Synthetic
gaccgucuccucuaccuc

SEQ ID NO: 13376 - RNA, 22 nt, Artificial Sequence
  Synthetic
gcgcgaccgucuccucuaccuc

SEQ ID NO: 13377 - RNA, 18 nt, Artificial Sequence
  Synthetic
ggcggugaggacaaaguc

SEQ ID NO: 13378 - RNA, 22 nt, Artificial Sequence
  Synthetic
guucggcggugaggacaaaguc

SEQ ID NO: 13379 - RNA, 18 nt, Artificial Sequence
  Synthetic
gacgaacccgggguuguc

SEQ ID NO: 13380 - RNA, 21 nt, Artificial Sequence
  Synthetic
ggugacgaacccgggguuguc

SEQ ID NO: 13381 - RNA, 24 nt, Artificial Sequence
  Synthetic
gaaggugacgaacccgggguuguc

SEQ ID NO: 13382 - RNA, 21 nt, Artificial Sequence
  Synthetic
guccggggggugccacacuuc

SEQ ID NO: 13383 - RNA, 24 nt, Artificial Sequence
  Synthetic
gucguccggggggugccacacuuc

SEQ ID NO: 13384 - RNA, 18 nt, Artificial Sequence
  Synthetic
ggccacccgguggccuuc

SEQ ID NO: 13385 - RNA, 22 nt, Artificial Sequence
  Synthetic
gaacggccacccgguggccuuc

SEQ ID NO: 13386 - RNA, 24 nt, Artificial Sequence
  Synthetic
gugaacggccacccgguggccuuc

SEQ ID NO: 13387 - RNA, 21 nt, Artificial Sequence
  Synthetic
gguucacgugaaacccggaag

SEQ ID NO: 13388 - RNA, 22 nt, Artificial Sequence
  Synthetic
ggguucacgugaaacccggaag

SEQ ID NO: 13389 - RNA, 23 nt, Artificial Sequence
  Synthetic
gggguucacgugaaacccggaag

SEQ ID NO: 13390 - RNA, 18 nt, Artificial Sequence
  Synthetic
ggcgagccagucccgcag

SEQ ID NO: 13391 - RNA, 22 nt, Artificial Sequence
  Synthetic
gcauggcgagccagucccgcag

SEQ ID NO: 13392 - RNA, 18 nt, Artificial Sequence
  Synthetic
gcuuggacgcgccucccg

SEQ ID NO: 13393 - RNA, 19 nt, Artificial Sequence
  Synthetic
ggcuuggacgcgccucccg

SEQ ID NO: 13394 - RNA, 21 nt, Artificial Sequence
  Synthetic
ggggcuuggacgcgccucccg

SEQ ID NO: 13395 - RNA, 23 nt, Artificial Sequence
  Synthetic
gcggggcuuggacgcgccucccg

SEQ ID NO: 13396 - RNA, 18 nt, Artificial Sequence
  Synthetic
gcgcggccacgucguccg

SEQ ID NO: 13397 - RNA, 21 nt, Artificial Sequence
  Synthetic
gccgcgcggccacgucguccg

SEQ ID NO: 13398 - RNA, 23 nt, Artificial Sequence
  Synthetic
gagccgcgcggccacgucguccg

SEQ ID NO: 13399 - RNA, 24 nt, Artificial Sequence
  Synthetic
ggagccgcgcggccacgucguccg

SEQ ID NO: 13400 - RNA, 21 nt, Artificial Sequence
  Synthetic
guacaguuaaacucgacgucg

SEQ ID NO: 13401 - RNA, 24 nt, Artificial Sequence
  Synthetic
gccguacaguuaaacucgacgucg

SEQ ID NO: 13402 - RNA, 18 nt, Artificial Sequence
  Synthetic
ggcucuaugcaacauucg

SEQ ID NO: 13403 - RNA, 18 nt, Artificial Sequence
  Synthetic
gccgccagcucguucagg

SEQ ID NO: 13404 - RNA, 19 nt, Artificial Sequence
  Synthetic
ggccgccagcucguucagg

SEQ ID NO: 13405 - RNA, 23 nt, Artificial Sequence
  Synthetic
gacgccgugggcaauggcguaug

SEQ ID NO: 13406 - RNA, 24 nt, Artificial Sequence
  Synthetic
gccaacagcaucucgaauucgcug

SEQ ID NO: 13407 - RNA, 21 nt, Artificial Sequence
  Synthetic
ggccuccucggggcugcucug

SEQ ID NO: 13408 - RNA, 18 nt, Artificial Sequence
  Synthetic
guagagcagacaggauau

SEQ ID NO: 13409 - RNA, 21 nt, Artificial Sequence
  Synthetic
gucguagagcagacaggauau

SEQ ID NO: 13410 - RNA, 22 nt, Artificial Sequence
  Synthetic
ggucguagagcagacaggauau

SEQ ID NO: 13411 - RNA, 22 nt, Artificial Sequence
  Synthetic
gauaucuggaugaccagguccu

SEQ ID NO: 13412 - RNA, 23 nt, Artificial Sequence
  Synthetic
ggauaucuggaugaccagguccu

SEQ ID NO: 13413 - RNA, 23 nt, Artificial Sequence
  Synthetic
gacaaaguccuggaugucccucu

SEQ ID NO: 13414 - RNA, 24 nt, Artificial Sequence
  Synthetic
ggacaaaguccuggaugucccucu

SEQ ID NO: 13415 - RNA, 19 nt, Artificial Sequence
  Synthetic
gcuggccgucguagauggu

SEQ ID NO: 13416 - RNA, 24 nt, Artificial Sequence
  Synthetic
gaucugcuggccgucguagauggu

SEQ ID NO: 13417 - RNA, 19 nt, Artificial Sequence
  Synthetic
gugguucuggaauucgaca

SEQ ID NO: 13418 - RNA, 23 nt, Artificial Sequence
  Synthetic
gcccgugguucuggaauucgaca

SEQ ID NO: 13419 - RNA, 19 nt, Artificial Sequence
  Synthetic
gccugacuccggaaggcca

SEQ ID NO: 13420 - RNA, 21 nt, Artificial Sequence
  Synthetic
gggccugacuccggaaggcca

SEQ ID NO: 13421 - RNA, 18 nt, Artificial Sequence
  Synthetic
ggucccguccaucaagga

SEQ ID NO: 13422 - RNA, 21 nt, Artificial Sequence
  Synthetic
gcaggucccguccaucaagga

SEQ ID NO: 13423 - RNA, 23 nt, Artificial Sequence
  Synthetic
gcgcaggucccguccaucaagga

SEQ ID NO: 13424 - RNA, 19 nt, Artificial Sequence
  Synthetic
gaucggcgaguacugcaua

SEQ ID NO: 13425 - RNA, 21 nt, Artificial Sequence
  Synthetic
gugaucggcgaguacugcaua

SEQ ID NO: 13426 - RNA, 22 nt, Artificial Sequence
  Synthetic
ggugaucggcgaguacugcaua

SEQ ID NO: 13427 - RNA, 23 nt, Artificial Sequence
  Synthetic
gggugaucggcgaguacugcaua

SEQ ID NO: 13428 - RNA, 24 nt, Artificial Sequence
  Synthetic
ggggugaucggcgaguacugcaua

SEQ ID NO: 13429 - RNA, 18 nt, Artificial Sequence
  Synthetic
ggugaacaucgacaugua

SEQ ID NO: 13430 - RNA, 22 nt, Artificial Sequence
  Synthetic
gcauggugaacaucgacaugua

SEQ ID NO: 13431 - RNA, 23 nt, Artificial Sequence
  Synthetic
ggcauggugaacaucgacaugua

SEQ ID NO: 13432 - RNA, 23 nt, Artificial Sequence
  Synthetic
gcuguuucugccccccaucaaac

SEQ ID NO: 13433 - RNA, 22 nt, Artificial Sequence
  Synthetic
guaacucgguguacggguucac

SEQ ID NO: 13434 - RNA, 24 nt, Artificial Sequence
  Synthetic
guguaacucgguguacggguucac

SEQ ID NO: 13435 - RNA, 19 nt, Artificial Sequence
  Synthetic
guacaucggcgucaucuac

SEQ ID NO: 13436 - RNA, 18 nt, Artificial Sequence
  Synthetic
gguucauccuggacaacc

SEQ ID NO: 13437 - RNA, 19 nt, Artificial Sequence
  Synthetic
gaauaacgccaagaucacc

SEQ ID NO: 13438 - RNA, 21 nt, Artificial Sequence
  Synthetic
gggaauaacgccaagaucacc

SEQ ID NO: 13439 - RNA, 19 nt, Artificial Sequence
  Synthetic
gagaugcugcucgcgaccc

SEQ ID NO: 13440 - RNA, 21 nt, Artificial Sequence
  Synthetic
gcgagaugcugcucgcgaccc

SEQ ID NO: 13441 - RNA, 24 nt, Artificial Sequence
  Synthetic
gccgcgagaugcugcucgcgaccc

SEQ ID NO: 13442 - RNA, 23 nt, Artificial Sequence
  Synthetic
gacccuugugaaacaguacggcc

SEQ ID NO: 13443 - RNA, 19 nt, Artificial Sequence
  Synthetic
gcugguguccgagcuggcc

SEQ ID NO: 13444 - RNA, 22 nt, Artificial Sequence
  Synthetic
gcugcugguguccgagcuggcc

SEQ ID NO: 13445 - RNA, 21 nt, Artificial Sequence
  Synthetic
gguaagaugcucaucaagggc

SEQ ID NO: 13446 - RNA, 22 nt, Artificial Sequence
  Synthetic
ggguaagaugcucaucaagggc

SEQ ID NO: 13447 - RNA, 23 nt, Artificial Sequence
  Synthetic
gggguaagaugcucaucaagggc

SEQ ID NO: 13448 - RNA, 24 nt, Artificial Sequence
  Synthetic
ggggguaagaugcucaucaagggc

SEQ ID NO: 13449 - RNA, 21 nt, Artificial Sequence
  Synthetic
gcacgugggguaccagggggc

SEQ ID NO: 13450 - RNA, 22 nt, Artificial Sequence
  Synthetic
ggcacgugggguaccagggggc

SEQ ID NO: 13451 - RNA, 18 nt, Artificial Sequence
  Synthetic
gcauggccgcggcccugc

SEQ ID NO: 13452 - RNA, 22 nt, Artificial Sequence
  Synthetic
gagcgcauggccgcggcccugc

SEQ ID NO: 13453 - RNA, 24 nt, Artificial Sequence
  Synthetic
gcgagcgcauggccgcggcccugc

SEQ ID NO: 13454 - RNA, 18 nt, Artificial Sequence
  Synthetic
gcgaaagcagauccgcuc

SEQ ID NO: 13455 - RNA, 23 nt, Artificial Sequence
  Synthetic
gccaugcgaaagcagauccgcuc

SEQ ID NO: 13456 - RNA, 21 nt, Artificial Sequence
  Synthetic
gccugcccacgcccgugguuc

SEQ ID NO: 13457 - RNA, 22 nt, Artificial Sequence
  Synthetic
ggccugcccacgcccgugguuc

SEQ ID NO: 13458 - RNA, 23 nt, Artificial Sequence
  Synthetic
gggccugcccacgcccgugguuc

SEQ ID NO: 13459 - RNA, 24 nt, Artificial Sequence
  Synthetic
ggggccugcccacgcccgugguuc

SEQ ID NO: 13460 - RNA, 19 nt, Artificial Sequence
  Synthetic
gagaccgccggcaggcacg

SEQ ID NO: 13461 - RNA, 21 nt, Artificial Sequence
  Synthetic
gggagaccgccggcaggcacg

SEQ ID NO: 13462 - RNA, 23 nt, Artificial Sequence
  Synthetic
gcgggagaccgccggcaggcacg

SEQ ID NO: 13463 - RNA, 22 nt, Artificial Sequence
  Synthetic
gccuucgggacauccagcgacg

SEQ ID NO: 13464 - RNA, 23 nt, Artificial Sequence
  Synthetic
ggccuucgggacauccagcgacg

SEQ ID NO: 13465 - RNA, 19 nt, Artificial Sequence
  Synthetic
gccgcgcggcuccggaccg

SEQ ID NO: 13466 - RNA, 22 nt, Artificial Sequence
  Synthetic
guggccgcgcggcuccggaccg

SEQ ID NO: 13467 - RNA, 19 nt, Artificial Sequence
  Synthetic
gaccgcaggguucggggcg

SEQ ID NO: 13468 - RNA, 19 nt, Artificial Sequence
  Synthetic
gcgcaacgcggggugaucg

SEQ ID NO: 13469 - RNA, 23 nt, Artificial Sequence
  Synthetic
gcccgcgcaacgcggggugaucg

SEQ ID NO: 13470 - RNA, 24 nt, Artificial Sequence
  Synthetic
ggcccgcgcaacgcggggugaucg

SEQ ID NO: 13471 - RNA, 22 nt, Artificial Sequence
  Synthetic
gcgcuacggcggaggaaacucg

SEQ ID NO: 13472 - RNA, 23 nt, Artificial Sequence
  Synthetic
ggcgcuacggcggaggaaacucg

SEQ ID NO: 13473 - RNA, 22 nt, Artificial Sequence
  Synthetic
gcguuagccgagcgccccgcgg

SEQ ID NO: 13474 - RNA, 21 nt, Artificial Sequence
  Synthetic
ggccaucaagaaguacgaggg

SEQ ID NO: 13475 - RNA, 22 nt, Artificial Sequence
  Synthetic
gacauuuacaaggucccccugg

SEQ ID NO: 13476 - RNA, 23 nt, Artificial Sequence
  Synthetic
ggacauuuacaaggucccccugg

SEQ ID NO: 13477 - RNA, 22 nt, Artificial Sequence
  Synthetic
gcucucggccgucgcgcgcuug

SEQ ID NO: 13478 - RNA, 24 nt, Artificial Sequence
  Synthetic
gagcucucggccgucgcgcgcuug

SEQ ID NO: 13479 - RNA, 19 nt, Artificial Sequence
  Synthetic
gucguguguaacucggugu

SEQ ID NO: 13480 - RNA, 18 nt, Artificial Sequence
  Synthetic
ggguccuugaccccacuu

SEQ ID NO: 13481 - RNA, 22 nt, Artificial Sequence
  Synthetic
gccaggguccuugaccccacuu

SEQ ID NO: 13482 - RNA, 23 nt, Artificial Sequence
  Synthetic
ggccaggguccuugaccccacuu

SEQ ID NO: 13483 - RNA, 24 nt, Artificial Sequence
  Synthetic
gggccaggguccuugaccccacuu

SEQ ID NO: 13484 - RNA, 19 nt, Artificial Sequence
  Synthetic
gacauucaaggcccuguuu

SEQ ID NO: 13485 - RNA, 21 nt, Artificial Sequence
  Synthetic
gugacauucaaggcccuguuu

SEQ ID NO: 13486 - RNA, 23 nt, Artificial Sequence
  Synthetic
gcgugacauucaaggcccuguuu

SEQ ID NO: 13487 - RNA, 19 nt, Artificial Sequence
  Synthetic
cgggguuguccaggaugaa

SEQ ID NO: 13488 - RNA, 21 nt, Artificial Sequence
  Synthetic
cccgggguuguccaggaugaa

SEQ ID NO: 13489 - RNA, 22 nt, Artificial Sequence
  Synthetic
acccgggguuguccaggaugaa

SEQ ID NO: 13490 - RNA, 23 nt, Artificial Sequence
  Synthetic
aacccgggguuguccaggaugaa

SEQ ID NO: 13491 - RNA, 18 nt, Artificial Sequence
  Synthetic
cucccgugaacccguaca

SEQ ID NO: 13492 - RNA, 19 nt, Artificial Sequence
  Synthetic
acucccgugaacccguaca

SEQ ID NO: 13493 - RNA, 22 nt, Artificial Sequence
  Synthetic
ugcacucccgugaacccguaca

SEQ ID NO: 13494 - RNA, 23 nt, Artificial Sequence
  Synthetic
cugcacucccgugaacccguaca

SEQ ID NO: 13495 - RNA, 18 nt, Artificial Sequence
  Synthetic
caaagucgaacaccacca

SEQ ID NO: 13496 - RNA, 21 nt, Artificial Sequence
  Synthetic
uggcaaagucgaacaccacca

SEQ ID NO: 13497 - RNA, 22 nt, Artificial Sequence
  Synthetic
cuggcaaagucgaacaccacca

SEQ ID NO: 13498 - RNA, 18 nt, Artificial Sequence
  Synthetic
acagcuggcccaccagca

SEQ ID NO: 13499 - RNA, 19 nt, Artificial Sequence
  Synthetic
aacagcuggcccaccagca

SEQ ID NO: 13500 - RNA, 21 nt, Artificial Sequence
  Synthetic
aaaacagcuggcccaccagca

SEQ ID NO: 13501 - RNA, 22 nt, Artificial Sequence
  Synthetic
aaaaacagcuggcccaccagca

SEQ ID NO: 13502 - RNA, 23 nt, Artificial Sequence
  Synthetic
aaaaaacagcuggcccaccagca

SEQ ID NO: 13503 - RNA, 24 nt, Artificial Sequence
  Synthetic
uaaaaaacagcuggcccaccagca

SEQ ID NO: 13504 - RNA, 18 nt, Artificial Sequence
  Synthetic
ccccguagaugaugcgca

SEQ ID NO: 13505 - RNA, 19 nt, Artificial Sequence
  Synthetic
uccccguagaugaugcgca

SEQ ID NO: 13506 - RNA, 21 nt, Artificial Sequence
  Synthetic
uguccccguagaugaugcgca

SEQ ID NO: 13507 - RNA, 23 nt, Artificial Sequence
  Synthetic
cguguccccguagaugaugcgca

SEQ ID NO: 13508 - RNA, 24 nt, Artificial Sequence
  Synthetic
ccguguccccguagaugaugcgca

SEQ ID NO: 13509 - RNA, 18 nt, Artificial Sequence
  Synthetic
cgcggcacagcacaaaga

SEQ ID NO: 13510 - RNA, 19 nt, Artificial Sequence
  Synthetic
ccgcggcacagcacaaaga

SEQ ID NO: 13511 - RNA, 22 nt, Artificial Sequence
  Synthetic
aggccgcggcacagcacaaaga

SEQ ID NO: 13512 - RNA, 24 nt, Artificial Sequence
  Synthetic
ugaggccgcggcacagcacaaaga

SEQ ID NO: 13513 - RNA, 23 nt, Artificial Sequence
  Synthetic
ugguggacaggucguagagcaga

SEQ ID NO: 13514 - RNA, 19 nt, Artificial Sequence
  Synthetic
ugcucuggggaauccgcga

SEQ ID NO: 13515 - RNA, 18 nt, Artificial Sequence
  Synthetic
cugggccacgaucacgua

SEQ ID NO: 13516 - RNA, 19 nt, Artificial Sequence
  Synthetic
ucugggccacgaucacgua

SEQ ID NO: 13517 - RNA, 23 nt, Artificial Sequence
  Synthetic
cgggucugggccacgaucacgua

SEQ ID NO: 13518 - RNA, 21 nt, Artificial Sequence
  Synthetic
uuggugaacgucuuuucgcac

SEQ ID NO: 13519 - RNA, 22 nt, Artificial Sequence
  Synthetic
cuuggugaacgucuuuucgcac

SEQ ID NO: 13520 - RNA, 24 nt, Artificial Sequence
  Synthetic
agcuuggugaacgucuuuucgcac

SEQ ID NO: 13521 - RNA, 19 nt, Artificial Sequence
  Synthetic
cggggccguacuguuucac

SEQ ID NO: 13522 - RNA, 21 nt, Artificial Sequence
  Synthetic
cucggggccguacuguuucac

SEQ ID NO: 13523 - RNA, 22 nt, Artificial Sequence
  Synthetic
acucggggccguacuguuucac

SEQ ID NO: 13524 - RNA, 23 nt, Artificial Sequence
  Synthetic
aacucggggccguacuguuucac

SEQ ID NO: 13525 - RNA, 18 nt, Artificial Sequence
  Synthetic
cagcaggcacguaaagac

SEQ ID NO: 13526 - RNA, 23 nt, Artificial Sequence
  Synthetic
aggcgcagcaggcacguaaagac

SEQ ID NO: 13527 - RNA, 24 nt, Artificial Sequence
  Synthetic
caggcgcagcaggcacguaaagac

SEQ ID NO: 13528 - RNA, 18 nt, Artificial Sequence
  Synthetic
agccgaaggugacgaacc

SEQ ID NO: 13529 - RNA, 19 nt, Artificial Sequence
  Synthetic
cagccgaaggugacgaacc

SEQ ID NO: 13530 - RNA, 21 nt, Artificial Sequence
  Synthetic
accagccgaaggugacgaacc

SEQ ID NO: 13531 - RNA, 22 nt, Artificial Sequence
  Synthetic
uaccagccgaaggugacgaacc

SEQ ID NO: 13532 - RNA, 19 nt, Artificial Sequence
  Synthetic
cggcgccccuaaaucgccc

SEQ ID NO: 13533 - RNA, 21 nt, Artificial Sequence
  Synthetic
cccggcgccccuaaaucgccc

SEQ ID NO: 13534 - RNA, 22 nt, Artificial Sequence
  Synthetic
ccccggcgccccuaaaucgccc

SEQ ID NO: 13535 - RNA, 23 nt, Artificial Sequence
  Synthetic
cccccggcgccccuaaaucgccc

SEQ ID NO: 13536 - RNA, 24 nt, Artificial Sequence
  Synthetic
ccccccggcgccccuaaaucgccc

SEQ ID NO: 13537 - RNA, 18 nt, Artificial Sequence
  Synthetic
uuauucccaaacagggcc

SEQ ID NO: 13538 - RNA, 23 nt, Artificial Sequence
  Synthetic
uggcguuauucccaaacagggcc

SEQ ID NO: 13539 - RNA, 24 nt, Artificial Sequence
  Synthetic
uuggcguuauucccaaacagggcc

SEQ ID NO: 13540 - RNA, 19 nt, Artificial Sequence
  Synthetic
cgcuuguugguguacgcgc

SEQ ID NO: 13541 - RNA, 22 nt, Artificial Sequence
  Synthetic
aggcgcuuguugguguacgcgc

SEQ ID NO: 13542 - RNA, 23 nt, Artificial Sequence
  Synthetic
caggcgcuuguugguguacgcgc

SEQ ID NO: 13543 - RNA, 24 nt, Artificial Sequence
  Synthetic
ccaggcgcuuguugguguacgcgc

SEQ ID NO: 13544 - RNA, 18 nt, Artificial Sequence
  Synthetic
cccggcggcguaguaggc

SEQ ID NO: 13545 - RNA, 22 nt, Artificial Sequence
  Synthetic
cgggcccggcggcguaguaggc

SEQ ID NO: 13546 - RNA, 24 nt, Artificial Sequence
  Synthetic
cgcgggcccggcggcguaguaggc

SEQ ID NO: 13547 - RNA, 22 nt, Artificial Sequence
  Synthetic
cgcggcaacgugcaggcacggc

SEQ ID NO: 13548 - RNA, 23 nt, Artificial Sequence
  Synthetic
ucgcggcaacgugcaggcacggc

SEQ ID NO: 13549 - RNA, 19 nt, Artificial Sequence
  Synthetic
cgccugcagucccucgggc

SEQ ID NO: 13550 - RNA, 21 nt, Artificial Sequence
  Synthetic
aacgccugcagucccucgggc

SEQ ID NO: 13551 - RNA, 23 nt, Artificial Sequence
  Synthetic
cgaacgccugcagucccucgggc

SEQ ID NO: 13552 - RNA, 24 nt, Artificial Sequence
  Synthetic
ccgaacgccugcagucccucgggc

SEQ ID NO: 13553 - RNA, 19 nt, Artificial Sequence
  Synthetic
ugaagcacagguugugggc

SEQ ID NO: 13554 - RNA, 22 nt, Artificial Sequence
  Synthetic
ugcugaagcacagguugugggc

SEQ ID NO: 13555 - RNA, 24 nt, Artificial Sequence
  Synthetic
cgugcugaagcacagguugugggc

SEQ ID NO: 13556 - RNA, 18 nt, Artificial Sequence
  Synthetic
ugugggccuggaugaugc

SEQ ID NO: 13557 - RNA, 19 nt, Artificial Sequence
  Synthetic
uugugggccuggaugaugc

SEQ ID NO: 13558 - RNA, 22 nt, Artificial Sequence
  Synthetic
agguugugggccuggaugaugc

SEQ ID NO: 13559 - RNA, 23 nt, Artificial Sequence
  Synthetic
cagguugugggccuggaugaugc

SEQ ID NO: 13560 - RNA, 24 nt, Artificial Sequence
  Synthetic
acagguugugggccuggaugaugc

SEQ ID NO: 13561 - RNA, 18 nt, Artificial Sequence
  Synthetic
augaaggccaacagcauc

SEQ ID NO: 13562 - RNA, 19 nt, Artificial Sequence
  Synthetic
caugaaggccaacagcauc

SEQ ID NO: 13563 - RNA, 24 nt, Artificial Sequence
  Synthetic
agggucaugaaggccaacagcauc

SEQ ID NO: 13564 - RNA, 19 nt, Artificial Sequence
  Synthetic
agcgcgcguggacguacuc

SEQ ID NO: 13565 - RNA, 21 nt, Artificial Sequence
  Synthetic
ccagcgcgcguggacguacuc

SEQ ID NO: 13566 - RNA, 22 nt, Artificial Sequence
  Synthetic
cccagcgcgcguggacguacuc

SEQ ID NO: 13567 - RNA, 24 nt, Artificial Sequence
  Synthetic
cgcccagcgcgcguggacguacuc

SEQ ID NO: 13568 - RNA, 19 nt, Artificial Sequence
  Synthetic
cgaccgucuccucuaccuc

SEQ ID NO: 13569 - RNA, 21 nt, Artificial Sequence
  Synthetic
cgcgaccgucuccucuaccuc

SEQ ID NO: 13570 - RNA, 23 nt, Artificial Sequence
  Synthetic
cgcgcgaccgucuccucuaccuc

SEQ ID NO: 13571 - RNA, 24 nt, Artificial Sequence
  Synthetic
ccgcgcgaccgucuccucuaccuc

SEQ ID NO: 13572 - RNA, 19 nt, Artificial Sequence
  Synthetic
cggcggugaggacaaaguc

SEQ ID NO: 13573 - RNA, 21 nt, Artificial Sequence
  Synthetic
uucggcggugaggacaaaguc

SEQ ID NO: 13574 - RNA, 23 nt, Artificial Sequence
  Synthetic
aguucggcggugaggacaaaguc

SEQ ID NO: 13575 - RNA, 24 nt, Artificial Sequence
  Synthetic
caguucggcggugaggacaaaguc

SEQ ID NO: 13576 - RNA, 19 nt, Artificial Sequence
  Synthetic
ugacgaacccgggguuguc

SEQ ID NO: 13577 - RNA, 22 nt, Artificial Sequence
  Synthetic
aggugacgaacccgggguuguc

SEQ ID NO: 13578 - RNA, 23 nt, Artificial Sequence
  Synthetic
aaggugacgaacccgggguuguc

SEQ ID NO: 13579 - RNA, 18 nt, Artificial Sequence
  Synthetic
cggggggugccacacuuc

SEQ ID NO: 13580 - RNA, 19 nt, Artificial Sequence
  Synthetic
ccggggggugccacacuuc

SEQ ID NO: 13581 - RNA, 22 nt, Artificial Sequence
  Synthetic
cguccggggggugccacacuuc

SEQ ID NO: 13582 - RNA, 23 nt, Artificial Sequence
  Synthetic
ucguccggggggugccacacuuc

SEQ ID NO: 13583 - RNA, 19 nt, Artificial Sequence
  Synthetic
cggccacccgguggccuuc

SEQ ID NO: 13584 - RNA, 21 nt, Artificial Sequence
  Synthetic
aacggccacccgguggccuuc

SEQ ID NO: 13585 - RNA, 23 nt, Artificial Sequence
  Synthetic
ugaacggccacccgguggccuuc

SEQ ID NO: 13586 - RNA, 18 nt, Artificial Sequence
  Synthetic
ucacgugaaacccggaag

SEQ ID NO: 13587 - RNA, 19 nt, Artificial Sequence
  Synthetic
uucacgugaaacccggaag

SEQ ID NO: 13588 - RNA, 24 nt, Artificial Sequence
  Synthetic
cgggguucacgugaaacccggaag

SEQ ID NO: 13589 - RNA, 19 nt, Artificial Sequence
  Synthetic
uggcgagccagucccgcag

SEQ ID NO: 13590 - RNA, 21 nt, Artificial Sequence
  Synthetic
cauggcgagccagucccgcag

SEQ ID NO: 13591 - RNA, 23 nt, Artificial Sequence
  Synthetic
cgcauggcgagccagucccgcag

SEQ ID NO: 13592 - RNA, 24 nt, Artificial Sequence
  Synthetic
ucgcauggcgagccagucccgcag

SEQ ID NO: 13593 - RNA, 22 nt, Artificial Sequence
  Synthetic
cggggcuuggacgcgccucccg

SEQ ID NO: 13594 - RNA, 24 nt, Artificial Sequence
  Synthetic
ugcggggcuuggacgcgccucccg

SEQ ID NO: 13595 - RNA, 19 nt, Artificial Sequence
  Synthetic
cgcgcggccacgucguccg

SEQ ID NO: 13596 - RNA, 22 nt, Artificial Sequence
  Synthetic
agccgcgcggccacgucguccg

SEQ ID NO: 13597 - RNA, 18 nt, Artificial Sequence
  Synthetic
caguuaaacucgacgucg

SEQ ID NO: 13598 - RNA, 19 nt, Artificial Sequence
  Synthetic
acaguuaaacucgacgucg

SEQ ID NO: 13599 - RNA, 22 nt, Artificial Sequence
  Synthetic
cguacaguuaaacucgacgucg

SEQ ID NO: 13600 - RNA, 23 nt, Artificial Sequence
  Synthetic
ccguacaguuaaacucgacgucg

SEQ ID NO: 13601 - RNA, 19 nt, Artificial Sequence
  Synthetic
aggcucuaugcaacauucg

SEQ ID NO: 13602 - RNA, 21 nt, Artificial Sequence
  Synthetic
aaaggcucuaugcaacauucg

SEQ ID NO: 13603 - RNA, 22 nt, Artificial Sequence
  Synthetic
caaaggcucuaugcaacauucg

SEQ ID NO: 13604 - RNA, 23 nt, Artificial Sequence
  Synthetic
ucaaaggcucuaugcaacauucg

SEQ ID NO: 13605 - RNA, 24 nt, Artificial Sequence
  Synthetic
aucaaaggcucuaugcaacauucg

SEQ ID NO: 13606 - RNA, 21 nt, Artificial Sequence
  Synthetic
cuggccgccagcucguucagg

SEQ ID NO: 13607 - RNA, 22 nt, Artificial Sequence
  Synthetic
ccuggccgccagcucguucagg

SEQ ID NO: 13608 - RNA, 23 nt, Artificial Sequence
  Synthetic
cccuggccgccagcucguucagg

SEQ ID NO: 13609 - RNA, 24 nt, Artificial Sequence
  Synthetic
ccccuggccgccagcucguucagg

SEQ ID NO: 13610 - RNA, 18 nt, Artificial Sequence
  Synthetic
ucgccccuggguguccgg

SEQ ID NO: 13611 - RNA, 19 nt, Artificial Sequence
  Synthetic
aucgccccuggguguccgg

SEQ ID NO: 13612 - RNA, 21 nt, Artificial Sequence
  Synthetic
aaaucgccccuggguguccgg

SEQ ID NO: 13613 - RNA, 22 nt, Artificial Sequence
  Synthetic
uaaaucgccccuggguguccgg

SEQ ID NO: 13614 - RNA, 23 nt, Artificial Sequence
  Synthetic
cuaaaucgccccuggguguccgg

SEQ ID NO: 13615 - RNA, 24 nt, Artificial Sequence
  Synthetic
ccuaaaucgccccuggguguccgg

SEQ ID NO: 13616 - RNA, 18 nt, Artificial Sequence
  Synthetic
cgugggcaauggcguaug

SEQ ID NO: 13617 - RNA, 19 nt, Artificial Sequence
  Synthetic
ccgugggcaauggcguaug

SEQ ID NO: 13618 - RNA, 21 nt, Artificial Sequence
  Synthetic
cgccgugggcaauggcguaug

SEQ ID NO: 13619 - RNA, 22 nt, Artificial Sequence
  Synthetic
acgccgugggcaauggcguaug

SEQ ID NO: 13620 - RNA, 24 nt, Artificial Sequence
  Synthetic
cgacgccgugggcaauggcguaug

SEQ ID NO: 13621 - RNA, 18 nt, Artificial Sequence
  Synthetic
agcaucucgaauucgcug

SEQ ID NO: 13622 - RNA, 19 nt, Artificial Sequence
  Synthetic
cagcaucucgaauucgcug

SEQ ID NO: 13623 - RNA, 21 nt, Artificial Sequence
  Synthetic
aacagcaucucgaauucgcug

SEQ ID NO: 13624 - RNA, 22 nt, Artificial Sequence
  Synthetic
caacagcaucucgaauucgcug

SEQ ID NO: 13625 - RNA, 23 nt, Artificial Sequence
  Synthetic
ccaacagcaucucgaauucgcug

SEQ ID NO: 13626 - RNA, 18 nt, Artificial Sequence
  Synthetic
cuccucggggcugcucug

SEQ ID NO: 13627 - RNA, 19 nt, Artificial Sequence
  Synthetic
ccuccucggggcugcucug

SEQ ID NO: 13628 - RNA, 22 nt, Artificial Sequence
  Synthetic
cggccuccucggggcugcucug

SEQ ID NO: 13629 - RNA, 23 nt, Artificial Sequence
  Synthetic
acggccuccucggggcugcucug

SEQ ID NO: 13630 - RNA, 24 nt, Artificial Sequence
  Synthetic
cacggccuccucggggcugcucug

SEQ ID NO: 13631 - RNA, 19 nt, Artificial Sequence
  Synthetic
cguagagcagacaggauau

SEQ ID NO: 13632 - RNA, 23 nt, Artificial Sequence
  Synthetic
aggucguagagcagacaggauau

SEQ ID NO: 13633 - RNA, 24 nt, Artificial Sequence
  Synthetic
caggucguagagcagacaggauau

SEQ ID NO: 13634 - RNA, 18 nt, Artificial Sequence
  Synthetic
ucuggaugaccagguccu

SEQ ID NO: 13635 - RNA, 19 nt, Artificial Sequence
  Synthetic
aucuggaugaccagguccu

SEQ ID NO: 13636 - RNA, 21 nt, Artificial Sequence
  Synthetic
auaucuggaugaccagguccu

SEQ ID NO: 13637 - RNA, 24 nt, Artificial Sequence
  Synthetic
aggauaucuggaugaccagguccu

SEQ ID NO: 13638 - RNA, 18 nt, Artificial Sequence
  Synthetic
aguccuggaugucccucu

SEQ ID NO: 13639 - RNA, 19 nt, Artificial Sequence
  Synthetic
aaguccuggaugucccucu

SEQ ID NO: 13640 - RNA, 21 nt, Artificial Sequence
  Synthetic
caaaguccuggaugucccucu

SEQ ID NO: 13641 - RNA, 22 nt, Artificial Sequence
  Synthetic
acaaaguccuggaugucccucu

SEQ ID NO: 13642 - RNA, 18 nt, Artificial Sequence
  Synthetic
cuggccgucguagauggu

SEQ ID NO: 13643 - RNA, 21 nt, Artificial Sequence
  Synthetic
cugcuggccgucguagauggu

SEQ ID NO: 13644 - RNA, 22 nt, Artificial Sequence
  Synthetic
ucugcuggccgucguagauggu

SEQ ID NO: 13645 - RNA, 23 nt, Artificial Sequence
  Synthetic
aucugcuggccgucguagauggu

SEQ ID NO: 13646 - RNA, 18 nt, Artificial Sequence
  Synthetic
ugguucuggaauucgaca

SEQ ID NO: 13647 - RNA, 21 nt, Artificial Sequence
  Synthetic
ccgugguucuggaauucgaca

SEQ ID NO: 13648 - RNA, 22 nt, Artificial Sequence
  Synthetic
cccgugguucuggaauucgaca

SEQ ID NO: 13649 - RNA, 24 nt, Artificial Sequence
  Synthetic
cgcccgugguucuggaauucgaca

SEQ ID NO: 13650 - RNA, 18 nt, Artificial Sequence
  Synthetic
ccugacuccggaaggcca

SEQ ID NO: 13651 - RNA, 22 nt, Artificial Sequence
  Synthetic
ugggccugacuccggaaggcca

SEQ ID NO: 13652 - RNA, 23 nt, Artificial Sequence
  Synthetic
cugggccugacuccggaaggcca

SEQ ID NO: 13653 - RNA, 24 nt, Artificial Sequence
  Synthetic
ccugggccugacuccggaaggcca

SEQ ID NO: 13654 - RNA, 19 nt, Artificial Sequence
  Synthetic
aggucccguccaucaagga

SEQ ID NO: 13655 - RNA, 22 nt, Artificial Sequence
  Synthetic
cgcaggucccguccaucaagga

SEQ ID NO: 13656 - RNA, 24 nt, Artificial Sequence
  Synthetic
cgcgcaggucccguccaucaagga

SEQ ID NO: 13657 - RNA, 18 nt, Artificial Sequence
  Synthetic
acggccccgaguucguga

SEQ ID NO: 13658 - RNA, 19 nt, Artificial Sequence
  Synthetic
uacggccccgaguucguga

SEQ ID NO: 13659 - RNA, 21 nt, Artificial Sequence
  Synthetic
aguacggccccgaguucguga

SEQ ID NO: 13660 - RNA, 22 nt, Artificial Sequence
  Synthetic
caguacggccccgaguucguga

SEQ ID NO: 13661 - RNA, 23 nt, Artificial Sequence
  Synthetic
acaguacggccccgaguucguga

SEQ ID NO: 13662 - RNA, 24 nt, Artificial Sequence
  Synthetic
aacaguacggccccgaguucguga

SEQ ID NO: 13663 - RNA, 18 nt, Artificial Sequence
  Synthetic
aucggcgaguacugcaua

SEQ ID NO: 13664 - RNA, 18 nt, Artificial Sequence
  Synthetic
agcucaugugcuucgaua

SEQ ID NO: 13665 - RNA, 19 nt, Artificial Sequence
  Synthetic
aagcucaugugcuucgaua

SEQ ID NO: 13666 - RNA, 21 nt, Artificial Sequence
  Synthetic
acaagcucaugugcuucgaua

SEQ ID NO: 13667 - RNA, 22 nt, Artificial Sequence
  Synthetic
uacaagcucaugugcuucgaua

SEQ ID NO: 13668 - RNA, 23 nt, Artificial Sequence
  Synthetic
auacaagcucaugugcuucgaua

SEQ ID NO: 13669 - RNA, 24 nt, Artificial Sequence
  Synthetic
cauacaagcucaugugcuucgaua

SEQ ID NO: 13670 - RNA, 19 nt, Artificial Sequence
  Synthetic
uggugaacaucgacaugua

SEQ ID NO: 13671 - RNA, 21 nt, Artificial Sequence
  Synthetic
cauggugaacaucgacaugua

SEQ ID NO: 13672 - RNA, 24 nt, Artificial Sequence
  Synthetic
cggcauggugaacaucgacaugua

SEQ ID NO: 13673 - RNA, 18 nt, Artificial Sequence
  Synthetic
uucugccccccaucaaac

SEQ ID NO: 13674 - RNA, 19 nt, Artificial Sequence
  Synthetic
uuucugccccccaucaaac

SEQ ID NO: 13675 - RNA, 21 nt, Artificial Sequence
  Synthetic
uguuucugccccccaucaaac

SEQ ID NO: 13676 - RNA, 22 nt, Artificial Sequence
  Synthetic
cuguuucugccccccaucaaac

SEQ ID NO: 13677 - RNA, 24 nt, Artificial Sequence
  Synthetic
cgcuguuucugccccccaucaaac

SEQ ID NO: 13678 - RNA, 18 nt, Artificial Sequence
  Synthetic
cucgguguacggguucac

SEQ ID NO: 13679 - RNA, 19 nt, Artificial Sequence
  Synthetic
acucgguguacggguucac

SEQ ID NO: 13680 - RNA, 21 nt, Artificial Sequence
  Synthetic
uaacucgguguacggguucac

SEQ ID NO: 13681 - RNA, 23 nt, Artificial Sequence
  Synthetic
uguaacucgguguacggguucac

SEQ ID NO: 13682 - RNA, 18 nt, Artificial Sequence
  Synthetic
uacaucggcgucaucuac

SEQ ID NO: 13683 - RNA, 21 nt, Artificial Sequence
  Synthetic
aaguacaucggcgucaucuac

SEQ ID NO: 13684 - RNA, 22 nt, Artificial Sequence
  Synthetic
aaaguacaucggcgucaucuac

SEQ ID NO: 13685 - RNA, 23 nt, Artificial Sequence
  Synthetic
aaaaguacaucggcgucaucuac

SEQ ID NO: 13686 - RNA, 24 nt, Artificial Sequence
  Synthetic
aaaaaguacaucggcgucaucuac

SEQ ID NO: 13687 - RNA, 18 nt, Artificial Sequence
  Synthetic
ccggccaucaagaaguac

SEQ ID NO: 13688 - RNA, 19 nt, Artificial Sequence
  Synthetic
cccggccaucaagaaguac

SEQ ID NO: 13689 - RNA, 21 nt, Artificial Sequence
  Synthetic
ugcccggccaucaagaaguac

SEQ ID NO: 13690 - RNA, 22 nt, Artificial Sequence
  Synthetic
cugcccggccaucaagaaguac

SEQ ID NO: 13691 - RNA, 23 nt, Artificial Sequence
  Synthetic
ucugcccggccaucaagaaguac

SEQ ID NO: 13692 - RNA, 24 nt, Artificial Sequence
  Synthetic
uucugcccggccaucaagaaguac

SEQ ID NO: 13693 - RNA, 19 nt, Artificial Sequence
  Synthetic
cgguucauccuggacaacc

SEQ ID NO: 13694 - RNA, 21 nt, Artificial Sequence
  Synthetic
cccgguucauccuggacaacc

SEQ ID NO: 13695 - RNA, 22 nt, Artificial Sequence
  Synthetic
acccgguucauccuggacaacc

SEQ ID NO: 13696 - RNA, 23 nt, Artificial Sequence
  Synthetic
cacccgguucauccuggacaacc

SEQ ID NO: 13697 - RNA, 24 nt, Artificial Sequence
  Synthetic
ccacccgguucauccuggacaacc

SEQ ID NO: 13698 - RNA, 18 nt, Artificial Sequence
  Synthetic
aauaacgccaagaucacc

SEQ ID NO: 13699 - RNA, 22 nt, Artificial Sequence
  Synthetic
ugggaauaacgccaagaucacc

SEQ ID NO: 13700 - RNA, 23 nt, Artificial Sequence
  Synthetic
uugggaauaacgccaagaucacc

SEQ ID NO: 13701 - RNA, 24 nt, Artificial Sequence
  Synthetic
uuugggaauaacgccaagaucacc

SEQ ID NO: 13702 - RNA, 18 nt, Artificial Sequence
  Synthetic
agaugcugcucgcgaccc

SEQ ID NO: 13703 - RNA, 22 nt, Artificial Sequence
  Synthetic
cgcgagaugcugcucgcgaccc

SEQ ID NO: 13704 - RNA, 23 nt, Artificial Sequence
  Synthetic
ccgcgagaugcugcucgcgaccc

SEQ ID NO: 13705 - RNA, 18 nt, Artificial Sequence
  Synthetic
uugugaaacaguacggcc

SEQ ID NO: 13706 - RNA, 19 nt, Artificial Sequence
  Synthetic
cuugugaaacaguacggcc

SEQ ID NO: 13707 - RNA, 21 nt, Artificial Sequence
  Synthetic
cccuugugaaacaguacggcc

SEQ ID NO: 13708 - RNA, 22 nt, Artificial Sequence
  Synthetic
acccuugugaaacaguacggcc

SEQ ID NO: 13709 - RNA, 24 nt, Artificial Sequence
  Synthetic
ugacccuugugaaacaguacggcc

SEQ ID NO: 13710 - RNA, 18 nt, Artificial Sequence
  Synthetic
cugguguccgagcuggcc

SEQ ID NO: 13711 - RNA, 21 nt, Artificial Sequence
  Synthetic
cugcugguguccgagcuggcc

SEQ ID NO: 13712 - RNA, 23 nt, Artificial Sequence
  Synthetic
agcugcugguguccgagcuggcc

SEQ ID NO: 13713 - RNA, 24 nt, Artificial Sequence
  Synthetic
aagcugcugguguccgagcuggcc

SEQ ID NO: 13714 - RNA, 18 nt, Artificial Sequence
  Synthetic
ucgguuccugcgaccucc

SEQ ID NO: 13715 - RNA, 19 nt, Artificial Sequence
  Synthetic
cucgguuccugcgaccucc

SEQ ID NO: 13716 - RNA, 21 nt, Artificial Sequence
  Synthetic
cgcucgguuccugcgaccucc

SEQ ID NO: 13717 - RNA, 22 nt, Artificial Sequence
  Synthetic
ucgcucgguuccugcgaccucc

SEQ ID NO: 13718 - RNA, 23 nt, Artificial Sequence
  Synthetic
uucgcucgguuccugcgaccucc

SEQ ID NO: 13719 - RNA, 24 nt, Artificial Sequence
  Synthetic
uuucgcucgguuccugcgaccucc

SEQ ID NO: 13720 - RNA, 18 nt, Artificial Sequence
  Synthetic
aagaugcucaucaagggc

SEQ ID NO: 13721 - RNA, 19 nt, Artificial Sequence
  Synthetic
uaagaugcucaucaagggc

SEQ ID NO: 13722 - RNA, 18 nt, Artificial Sequence
  Synthetic
cgugggguaccagggggc

SEQ ID NO: 13723 - RNA, 19 nt, Artificial Sequence
  Synthetic
acgugggguaccagggggc

SEQ ID NO: 13724 - RNA, 23 nt, Artificial Sequence
  Synthetic
aggcacgugggguaccagggggc

SEQ ID NO: 13725 - RNA, 24 nt, Artificial Sequence
  Synthetic
caggcacgugggguaccagggggc

SEQ ID NO: 13726 - RNA, 19 nt, Artificial Sequence
  Synthetic
cgcauggccgcggcccugc

SEQ ID NO: 13727 - RNA, 21 nt, Artificial Sequence
  Synthetic
agcgcauggccgcggcccugc

SEQ ID NO: 13728 - RNA, 23 nt, Artificial Sequence
  Synthetic
cgagcgcauggccgcggcccugc

SEQ ID NO: 13729 - RNA, 19 nt, Artificial Sequence
  Synthetic
ugcgaaagcagauccgcuc

SEQ ID NO: 13730 - RNA, 21 nt, Artificial Sequence
  Synthetic
caugcgaaagcagauccgcuc

SEQ ID NO: 13731 - RNA, 22 nt, Artificial Sequence
  Synthetic
ccaugcgaaagcagauccgcuc

SEQ ID NO: 13732 - RNA, 24 nt, Artificial Sequence
  Synthetic
cgccaugcgaaagcagauccgcuc

SEQ ID NO: 13733 - RNA, 18 nt, Artificial Sequence
  Synthetic
ugcccacgcccgugguuc

SEQ ID NO: 13734 - RNA, 19 nt, Artificial Sequence
  Synthetic
cugcccacgcccgugguuc

SEQ ID NO: 13735 - RNA, 18 nt, Artificial Sequence
  Synthetic
cgccgggcccgcgcaacg

SEQ ID NO: 13736 - RNA, 19 nt, Artificial Sequence
  Synthetic
ccgccgggcccgcgcaacg

SEQ ID NO: 13737 - RNA, 21 nt, Artificial Sequence
  Synthetic
cgccgccgggcccgcgcaacg

SEQ ID NO: 13738 - RNA, 22 nt, Artificial Sequence
  Synthetic
acgccgccgggcccgcgcaacg

SEQ ID NO: 13739 - RNA, 23 nt, Artificial Sequence
  Synthetic
uacgccgccgggcccgcgcaacg

SEQ ID NO: 13740 - RNA, 24 nt, Artificial Sequence
  Synthetic
cuacgccgccgggcccgcgcaacg

SEQ ID NO: 13741 - RNA, 18 nt, Artificial Sequence
  Synthetic
agaccgccggcaggcacg

SEQ ID NO: 13742 - RNA, 22 nt, Artificial Sequence
  Synthetic
cgggagaccgccggcaggcacg

SEQ ID NO: 13743 - RNA, 24 nt, Artificial Sequence
  Synthetic
cgcgggagaccgccggcaggcacg

SEQ ID NO: 13744 - RNA, 18 nt, Artificial Sequence
  Synthetic
ucgggacauccagcgacg

SEQ ID NO: 13745 - RNA, 19 nt, Artificial Sequence
  Synthetic
uucgggacauccagcgacg

SEQ ID NO: 13746 - RNA, 21 nt, Artificial Sequence
  Synthetic
ccuucgggacauccagcgacg

SEQ ID NO: 13747 - RNA, 24 nt, Artificial Sequence
  Synthetic
uggccuucgggacauccagcgacg

SEQ ID NO: 13748 - RNA, 18 nt, Artificial Sequence
  Synthetic
ccgcgcggcuccggaccg

SEQ ID NO: 13749 - RNA, 21 nt, Artificial Sequence
  Synthetic
uggccgcgcggcuccggaccg

SEQ ID NO: 13750 - RNA, 23 nt, Artificial Sequence
  Synthetic
cguggccgcgcggcuccggaccg

SEQ ID NO: 13751 - RNA, 24 nt, Artificial Sequence
  Synthetic
acguggccgcgcggcuccggaccg

SEQ ID NO: 13752 - RNA, 18 nt, Artificial Sequence
  Synthetic
accgcaggguucggggcg

SEQ ID NO: 13753 - RNA, 21 nt, Artificial Sequence
  Synthetic
cggaccgcaggguucggggcg

SEQ ID NO: 13754 - RNA, 22 nt, Artificial Sequence
  Synthetic
ccggaccgcaggguucggggcg

SEQ ID NO: 13755 - RNA, 23 nt, Artificial Sequence
  Synthetic
uccggaccgcaggguucggggcg

SEQ ID NO: 13756 - RNA, 24 nt, Artificial Sequence
  Synthetic
cuccggaccgcaggguucggggcg

SEQ ID NO: 13757 - RNA, 18 nt, Artificial Sequence
  Synthetic
cgcaacgcggggugaucg

SEQ ID NO: 13758 - RNA, 21 nt, Artificial Sequence
  Synthetic
ccgcgcaacgcggggugaucg

SEQ ID NO: 13759 - RNA, 22 nt, Artificial Sequence
  Synthetic
cccgcgcaacgcggggugaucg

SEQ ID NO: 13760 - RNA, 18 nt, Artificial Sequence
  Synthetic
uacggcggaggaaacucg

SEQ ID NO: 13761 - RNA, 19 nt, Artificial Sequence
  Synthetic
cuacggcggaggaaacucg

SEQ ID NO: 13762 - RNA, 21 nt, Artificial Sequence
  Synthetic
cgcuacggcggaggaaacucg

SEQ ID NO: 13763 - RNA, 24 nt, Artificial Sequence
  Synthetic
cggcgcuacggcggaggaaacucg

SEQ ID NO: 13764 - RNA, 18 nt, Artificial Sequence
  Synthetic
uagccgagcgccccgcgg

SEQ ID NO: 13765 - RNA, 19 nt, Artificial Sequence
  Synthetic
uuagccgagcgccccgcgg

SEQ ID NO: 13766 - RNA, 21 nt, Artificial Sequence
  Synthetic
cguuagccgagcgccccgcgg

SEQ ID NO: 13767 - RNA, 23 nt, Artificial Sequence
  Synthetic
cgcguuagccgagcgccccgcgg

SEQ ID NO: 13768 - RNA, 24 nt, Artificial Sequence
  Synthetic
ccgcguuagccgagcgccccgcgg

SEQ ID NO: 13769 - RNA, 18 nt, Artificial Sequence
  Synthetic
caucaagaaguacgaggg

SEQ ID NO: 13770 - RNA, 19 nt, Artificial Sequence
  Synthetic
ccaucaagaaguacgaggg

SEQ ID NO: 13771 - RNA, 22 nt, Artificial Sequence
  Synthetic
cggccaucaagaaguacgaggg

SEQ ID NO: 13772 - RNA, 23 nt, Artificial Sequence
  Synthetic
ccggccaucaagaaguacgaggg

SEQ ID NO: 13773 - RNA, 24 nt, Artificial Sequence
  Synthetic
cccggccaucaagaaguacgaggg

SEQ ID NO: 13774 - RNA, 18 nt, Artificial Sequence
  Synthetic
uuuacaaggucccccugg

SEQ ID NO: 13775 - RNA, 19 nt, Artificial Sequence
  Synthetic
auuuacaaggucccccugg

SEQ ID NO: 13776 - RNA, 21 nt, Artificial Sequence
  Synthetic
acauuuacaaggucccccugg

SEQ ID NO: 13777 - RNA, 24 nt, Artificial Sequence
  Synthetic
cggacauuuacaaggucccccugg

SEQ ID NO: 13778 - RNA, 18 nt, Artificial Sequence
  Synthetic
ucggccgucgcgcgcuug

SEQ ID NO: 13779 - RNA, 19 nt, Artificial Sequence
  Synthetic
cucggccgucgcgcgcuug

SEQ ID NO: 13780 - RNA, 21 nt, Artificial Sequence
  Synthetic
cucucggccgucgcgcgcuug

SEQ ID NO: 13781 - RNA, 23 nt, Artificial Sequence
  Synthetic
agcucucggccgucgcgcgcuug

SEQ ID NO: 13782 - RNA, 18 nt, Artificial Sequence
  Synthetic
ucguguguaacucggugu

SEQ ID NO: 13783 - RNA, 21 nt, Artificial Sequence
  Synthetic
aggucguguguaacucggugu

SEQ ID NO: 13784 - RNA, 22 nt, Artificial Sequence
  Synthetic
aaggucguguguaacucggugu

SEQ ID NO: 13785 - RNA, 23 nt, Artificial Sequence
  Synthetic
caaggucguguguaacucggugu

SEQ ID NO: 13786 - RNA, 24 nt, Artificial Sequence
  Synthetic
ucaaggucguguguaacucggugu

SEQ ID NO: 13787 - RNA, 19 nt, Artificial Sequence
  Synthetic
aggguccuugaccccacuu

SEQ ID NO: 13788 - RNA, 21 nt, Artificial Sequence
  Synthetic
ccaggguccuugaccccacuu

SEQ ID NO: 13789 - RNA, 18 nt, Artificial Sequence
  Synthetic
acauucaaggcccuguuu

SEQ ID NO: 13790 - RNA, 22 nt, Artificial Sequence
  Synthetic
cgugacauucaaggcccuguuu

SEQ ID NO: 13791 - RNA, 24 nt, Artificial Sequence
  Synthetic
ugcgugacauucaaggcccuguuu

SEQ ID NO: 13792 - RNA, 18 nt, Artificial Sequence
  Synthetic
gcaggaaccgagcgaaaa

SEQ ID NO: 13793 - RNA, 19 nt, Artificial Sequence
  Synthetic
cgcaggaaccgagcgaaaa

SEQ ID NO: 13794 - RNA, 21 nt, Artificial Sequence
  Synthetic
gucgcaggaaccgagcgaaaa

SEQ ID NO: 13795 - RNA, 22 nt, Artificial Sequence
  Synthetic
ggucgcaggaaccgagcgaaaa

SEQ ID NO: 13796 - RNA, 23 nt, Artificial Sequence
  Synthetic
aggucgcaggaaccgagcgaaaa

SEQ ID NO: 13797 - RNA, 24 nt, Artificial Sequence
  Synthetic
gaggucgcaggaaccgagcgaaaa

SEQ ID NO: 13798 - RNA, 18 nt, Artificial Sequence
  Synthetic
gacguagacgcgguaaaa

SEQ ID NO: 13799 - RNA, 19 nt, Artificial Sequence
  Synthetic
ggacguagacgcgguaaaa

SEQ ID NO: 13800 - RNA, 21 nt, Artificial Sequence
  Synthetic
ucggacguagacgcgguaaaa

SEQ ID NO: 13801 - RNA, 22 nt, Artificial Sequence
  Synthetic
uucggacguagacgcgguaaaa

SEQ ID NO: 13802 - RNA, 23 nt, Artificial Sequence
  Synthetic
cuucggacguagacgcgguaaaa

SEQ ID NO: 13803 - RNA, 24 nt, Artificial Sequence
  Synthetic
gcuucggacguagacgcgguaaaa

SEQ ID NO: 13804 - RNA, 18 nt, Artificial Sequence
  Synthetic
cuuggcguuauucccaaa

SEQ ID NO: 13805 - RNA, 19 nt, Artificial Sequence
  Synthetic
ucuuggcguuauucccaaa

SEQ ID NO: 13806 - RNA, 21 nt, Artificial Sequence
  Synthetic
gaucuuggcguuauucccaaa

SEQ ID NO: 13807 - RNA, 22 nt, Artificial Sequence
  Synthetic
ugaucuuggcguuauucccaaa

SEQ ID NO: 13808 - RNA, 23 nt, Artificial Sequence
  Synthetic
gugaucuuggcguuauucccaaa

SEQ ID NO: 13809 - RNA, 24 nt, Artificial Sequence
  Synthetic
ggugaucuuggcguuauucccaaa

SEQ ID NO: 13810 - RNA, 18 nt, Artificial Sequence
  Synthetic
ucggggaggucgcaggaa

SEQ ID NO: 13811 - RNA, 19 nt, Artificial Sequence
  Synthetic
uucggggaggucgcaggaa

SEQ ID NO: 13812 - RNA, 21 nt, Artificial Sequence
  Synthetic
gauucggggaggucgcaggaa

SEQ ID NO: 13813 - RNA, 22 nt, Artificial Sequence
  Synthetic
ggauucggggaggucgcaggaa

SEQ ID NO: 13814 - RNA, 23 nt, Artificial Sequence
  Synthetic
gggauucggggaggucgcaggaa

SEQ ID NO: 13815 - RNA, 24 nt, Artificial Sequence
  Synthetic
ugggauucggggaggucgcaggaa

SEQ ID NO: 13816 - RNA, 18 nt, Artificial Sequence
  Synthetic
uucacgugaaacccggaa

SEQ ID NO: 13817 - RNA, 19 nt, Artificial Sequence
  Synthetic
guucacgugaaacccggaa

SEQ ID NO: 13818 - RNA, 21 nt, Artificial Sequence
  Synthetic
ggguucacgugaaacccggaa

SEQ ID NO: 13819 - RNA, 22 nt, Artificial Sequence
  Synthetic
gggguucacgugaaacccggaa

SEQ ID NO: 13820 - RNA, 23 nt, Artificial Sequence
  Synthetic
cgggguucacgugaaacccggaa

SEQ ID NO: 13821 - RNA, 24 nt, Artificial Sequence
  Synthetic
acgggguucacgugaaacccggaa

SEQ ID NO: 13822 - RNA, 18 nt, Artificial Sequence
  Synthetic
uagaugaugcgcauggaa

SEQ ID NO: 13823 - RNA, 19 nt, Artificial Sequence
  Synthetic
guagaugaugcgcauggaa

SEQ ID NO: 13824 - RNA, 21 nt, Artificial Sequence
  Synthetic
ccguagaugaugcgcauggaa

SEQ ID NO: 13825 - RNA, 22 nt, Artificial Sequence
  Synthetic
cccguagaugaugcgcauggaa

SEQ ID NO: 13826 - RNA, 23 nt, Artificial Sequence
  Synthetic
ccccguagaugaugcgcauggaa

SEQ ID NO: 13827 - RNA, 24 nt, Artificial Sequence
  Synthetic
uccccguagaugaugcgcauggaa

SEQ ID NO: 13828 - RNA, 18 nt, Artificial Sequence
  Synthetic
uggaugucccgaaggcca

SEQ ID NO: 13829 - RNA, 19 nt, Artificial Sequence
  Synthetic
cuggaugucccgaaggcca

SEQ ID NO: 13830 - RNA, 21 nt, Artificial Sequence
  Synthetic
cgcuggaugucccgaaggcca

SEQ ID NO: 13831 - RNA, 22 nt, Artificial Sequence
  Synthetic
ucgcuggaugucccgaaggcca

SEQ ID NO: 13832 - RNA, 23 nt, Artificial Sequence
  Synthetic
gucgcuggaugucccgaaggcca

SEQ ID NO: 13833 - RNA, 24 nt, Artificial Sequence
  Synthetic
cgucgcuggaugucccgaaggcca

SEQ ID NO: 13834 - RNA, 18 nt, Artificial Sequence
  Synthetic
ccuccgggugcccggcca

SEQ ID NO: 13835 - RNA, 19 nt, Artificial Sequence
  Synthetic
uccuccgggugcccggcca

SEQ ID NO: 13836 - RNA, 21 nt, Artificial Sequence
  Synthetic
gguccuccgggugcccggcca

SEQ ID NO: 13837 - RNA, 22 nt, Artificial Sequence
  Synthetic
agguccuccgggugcccggcca

SEQ ID NO: 13838 - RNA, 23 nt, Artificial Sequence
  Synthetic
cagguccuccgggugcccggcca

SEQ ID NO: 13839 - RNA, 24 nt, Artificial Sequence
  Synthetic
ccagguccuccgggugcccggcca

SEQ ID NO: 13840 - RNA, 18 nt, Artificial Sequence
  Synthetic
ugcggccguacccgucca

SEQ ID NO: 13841 - RNA, 19 nt, Artificial Sequence
  Synthetic
augcggccguacccgucca

SEQ ID NO: 13842 - RNA, 21 nt, Artificial Sequence
  Synthetic
ucaugcggccguacccgucca

SEQ ID NO: 13843 - RNA, 22 nt, Artificial Sequence
  Synthetic
uucaugcggccguacccgucca

SEQ ID NO: 13844 - RNA, 23 nt, Artificial Sequence
  Synthetic
guucaugcggccguacccgucca

SEQ ID NO: 13845 - RNA, 24 nt, Artificial Sequence
  Synthetic
cguucaugcggccguacccgucca

SEQ ID NO: 13846 - RNA, 18 nt, Artificial Sequence
  Synthetic
ccacugcgucggcccuca

SEQ ID NO: 13847 - RNA, 19 nt, Artificial Sequence
  Synthetic
gccacugcgucggcccuca

SEQ ID NO: 13848 - RNA, 21 nt, Artificial Sequence
  Synthetic
gcgccacugcgucggcccuca

SEQ ID NO: 13849 - RNA, 22 nt, Artificial Sequence
  Synthetic
ugcgccacugcgucggcccuca

SEQ ID NO: 13850 - RNA, 23 nt, Artificial Sequence
  Synthetic
gugcgccacugcgucggcccuca

SEQ ID NO: 13851 - RNA, 24 nt, Artificial Sequence
  Synthetic
ggugcgccacugcgucggcccuca

SEQ ID NO: 13852 - RNA, 18 nt, Artificial Sequence
  Synthetic
uagacgcgguaaaacaga

SEQ ID NO: 13853 - RNA, 19 nt, Artificial Sequence
  Synthetic
guagacgcgguaaaacaga

SEQ ID NO: 13854 - RNA, 21 nt, Artificial Sequence
  Synthetic
acguagacgcgguaaaacaga

SEQ ID NO: 13855 - RNA, 22 nt, Artificial Sequence
  Synthetic
gacguagacgcgguaaaacaga

SEQ ID NO: 13856 - RNA, 23 nt, Artificial Sequence
  Synthetic
ggacguagacgcgguaaaacaga

SEQ ID NO: 13857 - RNA, 24 nt, Artificial Sequence
  Synthetic
cggacguagacgcgguaaaacaga

SEQ ID NO: 13858 - RNA, 18 nt, Artificial Sequence
  Synthetic
acggccgagagcuccaga

SEQ ID NO: 13859 - RNA, 19 nt, Artificial Sequence
  Synthetic
gacggccgagagcuccaga

SEQ ID NO: 13860 - RNA, 21 nt, Artificial Sequence
  Synthetic
gcgacggccgagagcuccaga

SEQ ID NO: 13861 - RNA, 22 nt, Artificial Sequence
  Synthetic
cgcgacggccgagagcuccaga

SEQ ID NO: 13862 - RNA, 23 nt, Artificial Sequence
  Synthetic
gcgcgacggccgagagcuccaga

SEQ ID NO: 13863 - RNA, 24 nt, Artificial Sequence
  Synthetic
cgcgcgacggccgagagcuccaga

SEQ ID NO: 13864 - RNA, 18 nt, Artificial Sequence
  Synthetic
ggaggucgcaggaaccga

SEQ ID NO: 13865 - RNA, 19 nt, Artificial Sequence
  Synthetic
gggaggucgcaggaaccga

SEQ ID NO: 13866 - RNA, 21 nt, Artificial Sequence
  Synthetic
cggggaggucgcaggaaccga

SEQ ID NO: 13867 - RNA, 22 nt, Artificial Sequence
  Synthetic
ucggggaggucgcaggaaccga

SEQ ID NO: 13868 - RNA, 23 nt, Artificial Sequence
  Synthetic
uucggggaggucgcaggaaccga

SEQ ID NO: 13869 - RNA, 24 nt, Artificial Sequence
  Synthetic
auucggggaggucgcaggaaccga

SEQ ID NO: 13870 - RNA, 18 nt, Artificial Sequence
  Synthetic
gauccgguccuugaugga

SEQ ID NO: 13871 - RNA, 19 nt, Artificial Sequence
  Synthetic
ggauccgguccuugaugga

SEQ ID NO: 13872 - RNA, 21 nt, Artificial Sequence
  Synthetic
cgggauccgguccuugaugga

SEQ ID NO: 13873 - RNA, 22 nt, Artificial Sequence
  Synthetic
acgggauccgguccuugaugga

SEQ ID NO: 13874 - RNA, 23 nt, Artificial Sequence
  Synthetic
uacgggauccgguccuugaugga

SEQ ID NO: 13875 - RNA, 24 nt, Artificial Sequence
  Synthetic
guacgggauccgguccuugaugga

SEQ ID NO: 13876 - RNA, 18 nt, Artificial Sequence
  Synthetic
uuucgcacucgaguuuga

SEQ ID NO: 13877 - RNA, 19 nt, Artificial Sequence
  Synthetic
uuuucgcacucgaguuuga

SEQ ID NO: 13878 - RNA, 21 nt, Artificial Sequence
  Synthetic
ucuuuucgcacucgaguuuga

SEQ ID NO: 13879 - RNA, 22 nt, Artificial Sequence
  Synthetic
gucuuuucgcacucgaguuuga

SEQ ID NO: 13880 - RNA, 23 nt, Artificial Sequence
  Synthetic
cgucuuuucgcacucgaguuuga

SEQ ID NO: 13881 - RNA, 24 nt, Artificial Sequence
  Synthetic
acgucuuuucgcacucgaguuuga

SEQ ID NO: 13882 - RNA, 18 nt, Artificial Sequence
  Synthetic
cccgccuugcauucgaua

SEQ ID NO: 13883 - RNA, 19 nt, Artificial Sequence
  Synthetic
ccccgccuugcauucgaua

SEQ ID NO: 13884 - RNA, 21 nt, Artificial Sequence
  Synthetic
ccccccgccuugcauucgaua

SEQ ID NO: 13885 - RNA, 22 nt, Artificial Sequence
  Synthetic
cccccccgccuugcauucgaua

SEQ ID NO: 13886 - RNA, 23 nt, Artificial Sequence
  Synthetic
ccccccccgccuugcauucgaua

SEQ ID NO: 13887 - RNA, 24 nt, Artificial Sequence
  Synthetic
uccccccccgccuugcauucgaua

SEQ ID NO: 13888 - RNA, 18 nt, Artificial Sequence
  Synthetic
caggaaccgagcgaaaac

SEQ ID NO: 13889 - RNA, 19 nt, Artificial Sequence
  Synthetic
gcaggaaccgagcgaaaac

SEQ ID NO: 13890 - RNA, 21 nt, Artificial Sequence
  Synthetic
ucgcaggaaccgagcgaaaac

SEQ ID NO: 13891 - RNA, 22 nt, Artificial Sequence
  Synthetic
gucgcaggaaccgagcgaaaac

SEQ ID NO: 13892 - RNA, 23 nt, Artificial Sequence
  Synthetic
ggucgcaggaaccgagcgaaaac

SEQ ID NO: 13893 - RNA, 24 nt, Artificial Sequence
  Synthetic
aggucgcaggaaccgagcgaaaac

SEQ ID NO: 13894 - RNA, 18 nt, Artificial Sequence
  Synthetic
acgggguucacgugaaac

SEQ ID NO: 13895 - RNA, 19 nt, Artificial Sequence
  Synthetic
cacgggguucacgugaaac

SEQ ID NO: 13896 - RNA, 21 nt, Artificial Sequence
  Synthetic
accacgggguucacgugaaac

SEQ ID NO: 13897 - RNA, 22 nt, Artificial Sequence
  Synthetic
caccacgggguucacgugaaac

SEQ ID NO: 13898 - RNA, 23 nt, Artificial Sequence
  Synthetic
ccaccacgggguucacgugaaac

SEQ ID NO: 13899 - RNA, 24 nt, Artificial Sequence
  Synthetic
accaccacgggguucacgugaaac

SEQ ID NO: 13900 - RNA, 18 nt, Artificial Sequence
  Synthetic
cugccgcgugccguaaac

SEQ ID NO: 13901 - RNA, 19 nt, Artificial Sequence
  Synthetic
acugccgcgugccguaaac

SEQ ID NO: 13902 - RNA, 21 nt, Artificial Sequence
  Synthetic
guacugccgcgugccguaaac

SEQ ID NO: 13903 - RNA, 22 nt, Artificial Sequence
  Synthetic
aguacugccgcgugccguaaac

SEQ ID NO: 13904 - RNA, 23 nt, Artificial Sequence
  Synthetic
aaguacugccgcgugccguaaac

SEQ ID NO: 13905 - RNA, 24 nt, Artificial Sequence
  Synthetic
aaaguacugccgcgugccguaaac

SEQ ID NO: 13906 - RNA, 18 nt, Artificial Sequence
  Synthetic
uuguacccggucacgaac

SEQ ID NO: 13907 - RNA, 19 nt, Artificial Sequence
  Synthetic
guuguacccggucacgaac

SEQ ID NO: 13908 - RNA, 21 nt, Artificial Sequence
  Synthetic
auguuguacccggucacgaac

SEQ ID NO: 13909 - RNA, 22 nt, Artificial Sequence
  Synthetic
gauguuguacccggucacgaac

SEQ ID NO: 13910 - RNA, 23 nt, Artificial Sequence
  Synthetic
ugauguuguacccggucacgaac

SEQ ID NO: 13911 - RNA, 24 nt, Artificial Sequence
  Synthetic
augauguuguacccggucacgaac

SEQ ID NO: 13912 - RNA, 18 nt, Artificial Sequence
  Synthetic
cagccgaaggugacgaac

SEQ ID NO: 13913 - RNA, 19 nt, Artificial Sequence
  Synthetic
ccagccgaaggugacgaac

SEQ ID NO: 13914 - RNA, 21 nt, Artificial Sequence
  Synthetic
uaccagccgaaggugacgaac

SEQ ID NO: 13915 - RNA, 22 nt, Artificial Sequence
  Synthetic
guaccagccgaaggugacgaac

SEQ ID NO: 13916 - RNA, 23 nt, Artificial Sequence
  Synthetic
gguaccagccgaaggugacgaac

SEQ ID NO: 13917 - RNA, 24 nt, Artificial Sequence
  Synthetic
cgguaccagccgaaggugacgaac

SEQ ID NO: 13918 - RNA, 18 nt, Artificial Sequence
  Synthetic
cuggccuaugucccacac

SEQ ID NO: 13919 - RNA, 19 nt, Artificial Sequence
  Synthetic
ucuggccuaugucccacac

SEQ ID NO: 13920 - RNA, 21 nt, Artificial Sequence
  Synthetic
gcucuggccuaugucccacac

SEQ ID NO: 13921 - RNA, 22 nt, Artificial Sequence
  Synthetic
ggcucuggccuaugucccacac

SEQ ID NO: 13922 - RNA, 23 nt, Artificial Sequence
  Synthetic
uggcucuggccuaugucccacac

SEQ ID NO: 13923 - RNA, 24 nt, Artificial Sequence
  Synthetic
guggcucuggccuaugucccacac

SEQ ID NO: 13924 - RNA, 18 nt, Artificial Sequence
  Synthetic
cuccgggugcccggccac

SEQ ID NO: 13925 - RNA, 19 nt, Artificial Sequence
  Synthetic
ccuccgggugcccggccac

SEQ ID NO: 13926 - RNA, 21 nt, Artificial Sequence
  Synthetic
guccuccgggugcccggccac

SEQ ID NO: 13927 - RNA, 22 nt, Artificial Sequence
  Synthetic
gguccuccgggugcccggccac

SEQ ID NO: 13928 - RNA, 23 nt, Artificial Sequence
  Synthetic
agguccuccgggugcccggccac

SEQ ID NO: 13929 - RNA, 24 nt, Artificial Sequence
  Synthetic
cagguccuccgggugcccggccac

SEQ ID NO: 13930 - RNA, 18 nt, Artificial Sequence
  Synthetic
cauucgauaucgaagcac

SEQ ID NO: 13931 - RNA, 19 nt, Artificial Sequence
  Synthetic
gcauucgauaucgaagcac

SEQ ID NO: 13932 - RNA, 21 nt, Artificial Sequence
  Synthetic
uugcauucgauaucgaagcac

SEQ ID NO: 13933 - RNA, 22 nt, Artificial Sequence
  Synthetic
cuugcauucgauaucgaagcac

SEQ ID NO: 13934 - RNA, 23 nt, Artificial Sequence
  Synthetic
ccuugcauucgauaucgaagcac

SEQ ID NO: 13935 - RNA, 24 nt, Artificial Sequence
  Synthetic
gccuugcauucgauaucgaagcac

SEQ ID NO: 13936 - RNA, 18 nt, Artificial Sequence
  Synthetic
gaggaggcucucucgcac

SEQ ID NO: 13937 - RNA, 19 nt, Artificial Sequence
  Synthetic
ugaggaggcucucucgcac

SEQ ID NO: 13938 - RNA, 21 nt, Artificial Sequence
  Synthetic
gcugaggaggcucucucgcac

SEQ ID NO: 13939 - RNA, 22 nt, Artificial Sequence
  Synthetic
ugcugaggaggcucucucgcac

SEQ ID NO: 13940 - RNA, 23 nt, Artificial Sequence
  Synthetic
augcugaggaggcucucucgcac

SEQ ID NO: 13941 - RNA, 24 nt, Artificial Sequence
  Synthetic
gaugcugaggaggcucucucgcac

SEQ ID NO: 13942 - RNA, 18 nt, Artificial Sequence
  Synthetic
caccaccacgggguucac

SEQ ID NO: 13943 - RNA, 19 nt, Artificial Sequence
  Synthetic
acaccaccacgggguucac

SEQ ID NO: 13944 - RNA, 21 nt, Artificial Sequence
  Synthetic
gaacaccaccacgggguucac

SEQ ID NO: 13945 - RNA, 22 nt, Artificial Sequence
  Synthetic
cgaacaccaccacgggguucac

SEQ ID NO: 13946 - RNA, 23 nt, Artificial Sequence
  Synthetic
ucgaacaccaccacgggguucac

SEQ ID NO: 13947 - RNA, 24 nt, Artificial Sequence
  Synthetic
gucgaacaccaccacgggguucac

SEQ ID NO: 13948 - RNA, 18 nt, Artificial Sequence
  Synthetic
guaaaacagcaggucgac

SEQ ID NO: 13949 - RNA, 19 nt, Artificial Sequence
  Synthetic
cguaaaacagcaggucgac

SEQ ID NO: 13950 - RNA, 21 nt, Artificial Sequence
  Synthetic
gucguaaaacagcaggucgac

SEQ ID NO: 13951 - RNA, 22 nt, Artificial Sequence
  Synthetic
cgucguaaaacagcaggucgac

SEQ ID NO: 13952 - RNA, 23 nt, Artificial Sequence
  Synthetic
ucgucguaaaacagcaggucgac

SEQ ID NO: 13953 - RNA, 24 nt, Artificial Sequence
  Synthetic
aucgucguaaaacagcaggucgac

SEQ ID NO: 13954 - RNA, 18 nt, Artificial Sequence
  Synthetic
gcgccgaugggcgucuac

SEQ ID NO: 13955 - RNA, 19 nt, Artificial Sequence
  Synthetic
ugcgccgaugggcgucuac

SEQ ID NO: 13956 - RNA, 21 nt, Artificial Sequence
  Synthetic
gaugcgccgaugggcgucuac

SEQ ID NO: 13957 - RNA, 22 nt, Artificial Sequence
  Synthetic
ugaugcgccgaugggcgucuac

SEQ ID NO: 13958 - RNA, 23 nt, Artificial Sequence
  Synthetic
gugaugcgccgaugggcgucuac

SEQ ID NO: 13959 - RNA, 24 nt, Artificial Sequence
  Synthetic
ggugaugcgccgaugggcgucuac

SEQ ID NO: 13960 - RNA, 18 nt, Artificial Sequence
  Synthetic
cgggguucacgugaaacc

SEQ ID NO: 13961 - RNA, 19 nt, Artificial Sequence
  Synthetic
acgggguucacgugaaacc

SEQ ID NO: 13962 - RNA, 21 nt, Artificial Sequence
  Synthetic
ccacgggguucacgugaaacc

SEQ ID NO: 13963 - RNA, 22 nt, Artificial Sequence
  Synthetic
accacgggguucacgugaaacc

SEQ ID NO: 13964 - RNA, 23 nt, Artificial Sequence
  Synthetic
caccacgggguucacgugaaacc

SEQ ID NO: 13965 - RNA, 24 nt, Artificial Sequence
  Synthetic
ccaccacgggguucacgugaaacc

SEQ ID NO: 13966 - RNA, 18 nt, Artificial Sequence
  Synthetic
cugucgaauuccagaacc

SEQ ID NO: 13967 - RNA, 19 nt, Artificial Sequence
  Synthetic
gcugucgaauuccagaacc

SEQ ID NO: 13968 - RNA, 21 nt, Artificial Sequence
  Synthetic
ucgcugucgaauuccagaacc

SEQ ID NO: 13969 - RNA, 22 nt, Artificial Sequence
  Synthetic
uucgcugucgaauuccagaacc

SEQ ID NO: 13970 - RNA, 23 nt, Artificial Sequence
  Synthetic
auucgcugucgaauuccagaacc

SEQ ID NO: 13971 - RNA, 24 nt, Artificial Sequence
  Synthetic
aauucgcugucgaauuccagaacc

SEQ ID NO: 13972 - RNA, 18 nt, Artificial Sequence
  Synthetic
gcaaagucgaacaccacc

SEQ ID NO: 13973 - RNA, 19 nt, Artificial Sequence
  Synthetic
ggcaaagucgaacaccacc

SEQ ID NO: 13974 - RNA, 21 nt, Artificial Sequence
  Synthetic
cuggcaaagucgaacaccacc

SEQ ID NO: 13975 - RNA, 22 nt, Artificial Sequence
  Synthetic
gcuggcaaagucgaacaccacc

SEQ ID NO: 13976 - RNA, 23 nt, Artificial Sequence
  Synthetic
ggcuggcaaagucgaacaccacc

SEQ ID NO: 13977 - RNA, 24 nt, Artificial Sequence
  Synthetic
aggcuggcaaagucgaacaccacc

SEQ ID NO: 13978 - RNA, 18 nt, Artificial Sequence
  Synthetic
gggggcgggcucgucccc

SEQ ID NO: 13979 - RNA, 19 nt, Artificial Sequence
  Synthetic
ggggggcgggcucgucccc

SEQ ID NO: 13980 - RNA, 21 nt, Artificial Sequence
  Synthetic
ggggggggcgggcucgucccc

SEQ ID NO: 13981 - RNA, 22 nt, Artificial Sequence
  Synthetic
cggggggggcgggcucgucccc

SEQ ID NO: 13982 - RNA, 23 nt, Artificial Sequence
  Synthetic
gcggggggggcgggcucgucccc

SEQ ID NO: 13983 - RNA, 24 nt, Artificial Sequence
  Synthetic
cgcggggggggcgggcucgucccc

SEQ ID NO: 13984 - RNA, 18 nt, Artificial Sequence
  Synthetic
ccgcggaacgacgcgccc

SEQ ID NO: 13985 - RNA, 19 nt, Artificial Sequence
  Synthetic
gccgcggaacgacgcgccc

SEQ ID NO: 13986 - RNA, 21 nt, Artificial Sequence
  Synthetic
augccgcggaacgacgcgccc

SEQ ID NO: 13987 - RNA, 22 nt, Artificial Sequence
  Synthetic
gaugccgcggaacgacgcgccc

SEQ ID NO: 13988 - RNA, 23 nt, Artificial Sequence
  Synthetic
agaugccgcggaacgacgcgccc

SEQ ID NO: 13989 - RNA, 24 nt, Artificial Sequence
  Synthetic
gagaugccgcggaacgacgcgccc

SEQ ID NO: 13990 - RNA, 18 nt, Artificial Sequence
  Synthetic
ccuuccggagucaggccc

SEQ ID NO: 13991 - RNA, 19 nt, Artificial Sequence
  Synthetic
gccuuccggagucaggccc

SEQ ID NO: 13992 - RNA, 21 nt, Artificial Sequence
  Synthetic
uggccuuccggagucaggccc

SEQ ID NO: 13993 - RNA, 22 nt, Artificial Sequence
  Synthetic
guggccuuccggagucaggccc

SEQ ID NO: 13994 - RNA, 23 nt, Artificial Sequence
  Synthetic
gguggccuuccggagucaggccc

SEQ ID NO: 13995 - RNA, 24 nt, Artificial Sequence
  Synthetic
cgguggccuuccggagucaggccc

SEQ ID NO: 13996 - RNA, 18 nt, Artificial Sequence
  Synthetic
gcaggucgaccagggccc

SEQ ID NO: 13997 - RNA, 19 nt, Artificial Sequence
  Synthetic
agcaggucgaccagggccc

SEQ ID NO: 13998 - RNA, 21 nt, Artificial Sequence
  Synthetic
acagcaggucgaccagggccc

SEQ ID NO: 13999 - RNA, 22 nt, Artificial Sequence
  Synthetic
aacagcaggucgaccagggccc

SEQ ID NO: 14000 - RNA, 23 nt, Artificial Sequence
  Synthetic
aaacagcaggucgaccagggccc

SEQ ID NO: 14001 - RNA, 24 nt, Artificial Sequence
  Synthetic
aaaacagcaggucgaccagggccc

SEQ ID NO: 14002 - RNA, 18 nt, Artificial Sequence
  Synthetic
gcgcauggaauagggccc

SEQ ID NO: 14003 - RNA, 19 nt, Artificial Sequence
  Synthetic
ugcgcauggaauagggccc

SEQ ID NO: 14004 - RNA, 21 nt, Artificial Sequence
  Synthetic
gaugcgcauggaauagggccc

SEQ ID NO: 14005 - RNA, 22 nt, Artificial Sequence
  Synthetic
ugaugcgcauggaauagggccc

SEQ ID NO: 14006 - RNA, 23 nt, Artificial Sequence
  Synthetic
augaugcgcauggaauagggccc

SEQ ID NO: 14007 - RNA, 24 nt, Artificial Sequence
  Synthetic
gaugaugcgcauggaauagggccc

SEQ ID NO: 14008 - RNA, 18 nt, Artificial Sequence
  Synthetic
aguccgugcugcacuccc

SEQ ID NO: 14009 - RNA, 19 nt, Artificial Sequence
  Synthetic
gaguccgugcugcacuccc

SEQ ID NO: 14010 - RNA, 21 nt, Artificial Sequence
  Synthetic
aggaguccgugcugcacuccc

SEQ ID NO: 14011 - RNA, 22 nt, Artificial Sequence
  Synthetic
caggaguccgugcugcacuccc

SEQ ID NO: 14012 - RNA, 23 nt, Artificial Sequence
  Synthetic
gcaggaguccgugcugcacuccc

SEQ ID NO: 14013 - RNA, 24 nt, Artificial Sequence
  Synthetic
ggcaggaguccgugcugcacuccc

SEQ ID NO: 14014 - RNA, 18 nt, Artificial Sequence
  Synthetic
ggcuuggacgcgccuccc

SEQ ID NO: 14015 - RNA, 19 nt, Artificial Sequence
  Synthetic
gggcuuggacgcgccuccc

SEQ ID NO: 14016 - RNA, 21 nt, Artificial Sequence
  Synthetic
cggggcuuggacgcgccuccc

SEQ ID NO: 14017 - RNA, 22 nt, Artificial Sequence
  Synthetic
gcggggcuuggacgcgccuccc

SEQ ID NO: 14018 - RNA, 23 nt, Artificial Sequence
  Synthetic
ugcggggcuuggacgcgccuccc

SEQ ID NO: 14019 - RNA, 24 nt, Artificial Sequence
  Synthetic
uugcggggcuuggacgcgccuccc

SEQ ID NO: 14020 - RNA, 18 nt, Artificial Sequence
  Synthetic
caggcgacggcgucuccc

SEQ ID NO: 14021 - RNA, 19 nt, Artificial Sequence
  Synthetic
gcaggcgacggcgucuccc

SEQ ID NO: 14022 - RNA, 21 nt, Artificial Sequence
  Synthetic
cggcaggcgacggcgucuccc

SEQ ID NO: 14023 - RNA, 22 nt, Artificial Sequence
  Synthetic
ucggcaggcgacggcgucuccc

SEQ ID NO: 14024 - RNA, 23 nt, Artificial Sequence
  Synthetic
gucggcaggcgacggcgucuccc

SEQ ID NO: 14025 - RNA, 24 nt, Artificial Sequence
  Synthetic
ggucggcaggcgacggcgucuccc

SEQ ID NO: 14026 - RNA, 18 nt, Artificial Sequence
  Synthetic
ccgaacgccugcaguccc

SEQ ID NO: 14027 - RNA, 19 nt, Artificial Sequence
  Synthetic
cccgaacgccugcaguccc

SEQ ID NO: 14028 - RNA, 21 nt, Artificial Sequence
  Synthetic
gccccgaacgccugcaguccc

SEQ ID NO: 14029 - RNA, 22 nt, Artificial Sequence
  Synthetic
ggccccgaacgccugcaguccc

SEQ ID NO: 14030 - RNA, 23 nt, Artificial Sequence
  Synthetic
cggccccgaacgccugcaguccc

SEQ ID NO: 14031 - RNA, 24 nt, Artificial Sequence
  Synthetic
acggccccgaacgccugcaguccc

SEQ ID NO: 14032 - RNA, 18 nt, Artificial Sequence
  Synthetic
ggggggcgggcucguccc

SEQ ID NO: 14033 - RNA, 19 nt, Artificial Sequence
  Synthetic
gggggggcgggcucguccc

SEQ ID NO: 14034 - RNA, 21 nt, Artificial Sequence
  Synthetic
cggggggggcgggcucguccc

SEQ ID NO: 14035 - RNA, 22 nt, Artificial Sequence
  Synthetic
gcggggggggcgggcucguccc

SEQ ID NO: 14036 - RNA, 23 nt, Artificial Sequence
  Synthetic
cgcggggggggcgggcucguccc

SEQ ID NO: 14037 - RNA, 24 nt, Artificial Sequence
  Synthetic
ccgcggggggggcgggcucguccc

SEQ ID NO: 14038 - RNA, 18 nt, Artificial Sequence
  Synthetic
cguguucagggcgacgcc

SEQ ID NO: 14039 - RNA, 19 nt, Artificial Sequence
  Synthetic
ccguguucagggcgacgcc

SEQ ID NO: 14040 - RNA, 21 nt, Artificial Sequence
  Synthetic
guccguguucagggcgacgcc

SEQ ID NO: 14041 - RNA, 22 nt, Artificial Sequence
  Synthetic
aguccguguucagggcgacgcc

SEQ ID NO: 14042 - RNA, 23 nt, Artificial Sequence
  Synthetic
uaguccguguucagggcgacgcc

SEQ ID NO: 14043 - RNA, 24 nt, Artificial Sequence
  Synthetic
auaguccguguucagggcgacgcc

SEQ ID NO: 14044 - RNA, 18 nt, Artificial Sequence
  Synthetic
gcgccggcacccaccgcc

SEQ ID NO: 14045 - RNA, 19 nt, Artificial Sequence
  Synthetic
agcgccggcacccaccgcc

SEQ ID NO: 14046 - RNA, 21 nt, Artificial Sequence
  Synthetic
guagcgccggcacccaccgcc

SEQ ID NO: 14047 - RNA, 22 nt, Artificial Sequence
  Synthetic
cguagcgccggcacccaccgcc

SEQ ID NO: 14048 - RNA, 23 nt, Artificial Sequence
  Synthetic
ccguagcgccggcacccaccgcc

SEQ ID NO: 14049 - RNA, 24 nt, Artificial Sequence
  Synthetic
gccguagcgccggcacccaccgcc

SEQ ID NO: 14050 - RNA, 18 nt, Artificial Sequence
  Synthetic
cgcuccaccaccuccgcc

SEQ ID NO: 14051 - RNA, 19 nt, Artificial Sequence
  Synthetic
gcgcuccaccaccuccgcc

SEQ ID NO: 14052 - RNA, 21 nt, Artificial Sequence
  Synthetic
gugcgcuccaccaccuccgcc

SEQ ID NO: 14053 - RNA, 22 nt, Artificial Sequence
  Synthetic
ggugcgcuccaccaccuccgcc

SEQ ID NO: 14054 - RNA, 23 nt, Artificial Sequence
  Synthetic
cggugcgcuccaccaccuccgcc

SEQ ID NO: 14055 - RNA, 24 nt, Artificial Sequence
  Synthetic
ucggugcgcuccaccaccuccgcc

SEQ ID NO: 14056 - RNA, 18 nt, Artificial Sequence
  Synthetic
gccgcggaacgacgcgcc

SEQ ID NO: 14057 - RNA, 19 nt, Artificial Sequence
  Synthetic
ugccgcggaacgacgcgcc

SEQ ID NO: 14058 - RNA, 21 nt, Artificial Sequence
  Synthetic
gaugccgcggaacgacgcgcc

SEQ ID NO: 14059 - RNA, 22 nt, Artificial Sequence
  Synthetic
agaugccgcggaacgacgcgcc

SEQ ID NO: 14060 - RNA, 23 nt, Artificial Sequence
  Synthetic
gagaugccgcggaacgacgcgcc

SEQ ID NO: 14061 - RNA, 24 nt, Artificial Sequence
  Synthetic
ggagaugccgcggaacgacgcgcc

SEQ ID NO: 14062 - RNA, 18 nt, Artificial Sequence
  Synthetic
gccuuccggagucaggcc

SEQ ID NO: 14063 - RNA, 19 nt, Artificial Sequence
  Synthetic
ggccuuccggagucaggcc

SEQ ID NO: 14064 - RNA, 21 nt, Artificial Sequence
  Synthetic
guggccuuccggagucaggcc

SEQ ID NO: 14065 - RNA, 22 nt, Artificial Sequence
  Synthetic
gguggccuuccggagucaggcc

SEQ ID NO: 14066 - RNA, 23 nt, Artificial Sequence
  Synthetic
cgguggccuuccggagucaggcc

SEQ ID NO: 14067 - RNA, 24 nt, Artificial Sequence
  Synthetic
ccgguggccuuccggagucaggcc

SEQ ID NO: 14068 - RNA, 18 nt, Artificial Sequence
  Synthetic
gccaagcgcgcgacggcc

SEQ ID NO: 14069 - RNA, 19 nt, Artificial Sequence
  Synthetic
cgccaagcgcgcgacggcc

SEQ ID NO: 14070 - RNA, 21 nt, Artificial Sequence
  Synthetic
cccgccaagcgcgcgacggcc

SEQ ID NO: 14071 - RNA, 22 nt, Artificial Sequence
  Synthetic
acccgccaagcgcgcgacggcc

SEQ ID NO: 14072 - RNA, 23 nt, Artificial Sequence
  Synthetic
uacccgccaagcgcgcgacggcc

SEQ ID NO: 14073 - RNA, 24 nt, Artificial Sequence
  Synthetic
auacccgccaagcgcgcgacggcc

SEQ ID NO: 14074 - RNA, 18 nt, Artificial Sequence
  Synthetic
gcgucuacgaggacggcc

SEQ ID NO: 14075 - RNA, 19 nt, Artificial Sequence
  Synthetic
ggcgucuacgaggacggcc

SEQ ID NO: 14076 - RNA, 21 nt, Artificial Sequence
  Synthetic
ugggcgucuacgaggacggcc

SEQ ID NO: 14077 - RNA, 22 nt, Artificial Sequence
  Synthetic
augggcgucuacgaggacggcc

SEQ ID NO: 14078 - RNA, 23 nt, Artificial Sequence
  Synthetic
gaugggcgucuacgaggacggcc

SEQ ID NO: 14079 - RNA, 24 nt, Artificial Sequence
  Synthetic
cgaugggcgucuacgaggacggcc

SEQ ID NO: 14080 - RNA, 18 nt, Artificial Sequence
  Synthetic
gccgucagcccggcggcc

SEQ ID NO: 14081 - RNA, 19 nt, Artificial Sequence
  Synthetic
ggccgucagcccggcggcc

SEQ ID NO: 14082 - RNA, 21 nt, Artificial Sequence
  Synthetic
acggccgucagcccggcggcc

SEQ ID NO: 14083 - RNA, 22 nt, Artificial Sequence
  Synthetic
cacggccgucagcccggcggcc

SEQ ID NO: 14084 - RNA, 23 nt, Artificial Sequence
  Synthetic
ccacggccgucagcccggcggcc

SEQ ID NO: 14085 - RNA, 24 nt, Artificial Sequence
  Synthetic
cccacggccgucagcccggcggcc

SEQ ID NO: 14086 - RNA, 18 nt, Artificial Sequence
  Synthetic
gccuccgggaaaucggcc

SEQ ID NO: 14087 - RNA, 19 nt, Artificial Sequence
  Synthetic
cgccuccgggaaaucggcc

SEQ ID NO: 14088 - RNA, 21 nt, Artificial Sequence
  Synthetic
gccgccuccgggaaaucggcc

SEQ ID NO: 14089 - RNA, 22 nt, Artificial Sequence
  Synthetic
ggccgccuccgggaaaucggcc

SEQ ID NO: 14090 - RNA, 23 nt, Artificial Sequence
  Synthetic
cggccgccuccgggaaaucggcc

SEQ ID NO: 14091 - RNA, 24 nt, Artificial Sequence
  Synthetic
ucggccgccuccgggaaaucggcc

SEQ ID NO: 14092 - RNA, 18 nt, Artificial Sequence
  Synthetic
agcaggucgaccagggcc

SEQ ID NO: 14093 - RNA, 19 nt, Artificial Sequence
  Synthetic
cagcaggucgaccagggcc

SEQ ID NO: 14094 - RNA, 21 nt, Artificial Sequence
  Synthetic
aacagcaggucgaccagggcc

SEQ ID NO: 14095 - RNA, 22 nt, Artificial Sequence
  Synthetic
aaacagcaggucgaccagggcc

SEQ ID NO: 14096 - RNA, 23 nt, Artificial Sequence
  Synthetic
aaaacagcaggucgaccagggcc

SEQ ID NO: 14097 - RNA, 24 nt, Artificial Sequence
  Synthetic
uaaaacagcaggucgaccagggcc

SEQ ID NO: 14098 - RNA, 18 nt, Artificial Sequence
  Synthetic
gccggggagggcagggcc

SEQ ID NO: 14099 - RNA, 19 nt, Artificial Sequence
  Synthetic
ggccggggagggcagggcc

SEQ ID NO: 14100 - RNA, 21 nt, Artificial Sequence
  Synthetic
uuggccggggagggcagggcc

SEQ ID NO: 14101 - RNA, 22 nt, Artificial Sequence
  Synthetic
cuuggccggggagggcagggcc

SEQ ID NO: 14102 - RNA, 23 nt, Artificial Sequence
  Synthetic
gcuuggccggggagggcagggcc

SEQ ID NO: 14103 - RNA, 24 nt, Artificial Sequence
  Synthetic
cgcuuggccggggagggcagggcc

SEQ ID NO: 14104 - RNA, 18 nt, Artificial Sequence
  Synthetic
ugcgcauggaauagggcc

SEQ ID NO: 14105 - RNA, 19 nt, Artificial Sequence
  Synthetic
augcgcauggaauagggcc

SEQ ID NO: 14106 - RNA, 21 nt, Artificial Sequence
  Synthetic
ugaugcgcauggaauagggcc

SEQ ID NO: 14107 - RNA, 22 nt, Artificial Sequence
  Synthetic
augaugcgcauggaauagggcc

SEQ ID NO: 14108 - RNA, 23 nt, Artificial Sequence
  Synthetic
gaugaugcgcauggaauagggcc

SEQ ID NO: 14109 - RNA, 24 nt, Artificial Sequence
  Synthetic
agaugaugcgcauggaauagggcc

SEQ ID NO: 14110 - RNA, 18 nt, Artificial Sequence
  Synthetic
accugcgcgcggcgggcc

SEQ ID NO: 14111 - RNA, 19 nt, Artificial Sequence
  Synthetic
gaccugcgcgcggcgggcc

SEQ ID NO: 14112 - RNA, 21 nt, Artificial Sequence
  Synthetic
gggaccugcgcgcggcgggcc

SEQ ID NO: 14113 - RNA, 22 nt, Artificial Sequence
  Synthetic
cgggaccugcgcgcggcgggcc

SEQ ID NO: 14114 - RNA, 23 nt, Artificial Sequence
  Synthetic
acgggaccugcgcgcggcgggcc

SEQ ID NO: 14115 - RNA, 24 nt, Artificial Sequence
  Synthetic
gacgggaccugcgcgcggcgggcc

SEQ ID NO: 14116 - RNA, 18 nt, Artificial Sequence
  Synthetic
ucccgggggcgcuuggcc

SEQ ID NO: 14117 - RNA, 19 nt, Artificial Sequence
  Synthetic
cucccgggggcgcuuggcc

SEQ ID NO: 14118 - RNA, 21 nt, Artificial Sequence
  Synthetic
gucucccgggggcgcuuggcc

SEQ ID NO: 14119 - RNA, 22 nt, Artificial Sequence
  Synthetic
cgucucccgggggcgcuuggcc

SEQ ID NO: 14120 - RNA, 23 nt, Artificial Sequence
  Synthetic
gcgucucccgggggcgcuuggcc

SEQ ID NO: 14121 - RNA, 24 nt, Artificial Sequence
  Synthetic
ggcgucucccgggggcgcuuggcc

SEQ ID NO: 14122 - RNA, 18 nt, Artificial Sequence
  Synthetic
gugguccgcggagaugcc

SEQ ID NO: 14123 - RNA, 19 nt, Artificial Sequence
  Synthetic
agugguccgcggagaugcc

SEQ ID NO: 14124 - RNA, 21 nt, Artificial Sequence
  Synthetic
gaagugguccgcggagaugcc

SEQ ID NO: 14125 - RNA, 22 nt, Artificial Sequence
  Synthetic
cgaagugguccgcggagaugcc

SEQ ID NO: 14126 - RNA, 23 nt, Artificial Sequence
  Synthetic
ucgaagugguccgcggagaugcc

SEQ ID NO: 14127 - RNA, 24 nt, Artificial Sequence
  Synthetic
cucgaagugguccgcggagaugcc

SEQ ID NO: 14128 - RNA, 18 nt, Artificial Sequence
  Synthetic
ggcugcucuggggaaucc

SEQ ID NO: 14129 - RNA, 19 nt, Artificial Sequence
  Synthetic
gggcugcucuggggaaucc

SEQ ID NO: 14130 - RNA, 21 nt, Artificial Sequence
  Synthetic
cggggcugcucuggggaaucc

SEQ ID NO: 14131 - RNA, 22 nt, Artificial Sequence
  Synthetic
ucggggcugcucuggggaaucc

SEQ ID NO: 14132 - RNA, 23 nt, Artificial Sequence
  Synthetic
cucggggcugcucuggggaaucc

SEQ ID NO: 14133 - RNA, 24 nt, Artificial Sequence
  Synthetic
ccucggggcugcucuggggaaucc

SEQ ID NO: 14134 - RNA, 18 nt, Artificial Sequence
  Synthetic
cgcaugucggccgccucc

SEQ ID NO: 14135 - RNA, 19 nt, Artificial Sequence
  Synthetic
gcgcaugucggccgccucc

SEQ ID NO: 14136 - RNA, 21 nt, Artificial Sequence
  Synthetic
gcgcgcaugucggccgccucc

SEQ ID NO: 14137 - RNA, 22 nt, Artificial Sequence
  Synthetic
ggcgcgcaugucggccgccucc

SEQ ID NO: 14138 - RNA, 23 nt, Artificial Sequence
  Synthetic
gggcgcgcaugucggccgccucc

SEQ ID NO: 14139 - RNA, 24 nt, Artificial Sequence
  Synthetic
ggggcgcgcaugucggccgccucc

SEQ ID NO: 14140 - RNA, 18 nt, Artificial Sequence
  Synthetic
gggcuuggacgcgccucc

SEQ ID NO: 14141 - RNA, 19 nt, Artificial Sequence
  Synthetic
ggggcuuggacgcgccucc

SEQ ID NO: 14142 - RNA, 21 nt, Artificial Sequence
  Synthetic
gcggggcuuggacgcgccucc

SEQ ID NO: 14143 - RNA, 22 nt, Artificial Sequence
  Synthetic
ugcggggcuuggacgcgccucc

SEQ ID NO: 14144 - RNA, 23 nt, Artificial Sequence
  Synthetic
uugcggggcuuggacgcgccucc

SEQ ID NO: 14145 - RNA, 24 nt, Artificial Sequence
  Synthetic
cuugcggggcuuggacgcgccucc

SEQ ID NO: 14146 - RNA, 18 nt, Artificial Sequence
  Synthetic
uccaggagcacggccucc

SEQ ID NO: 14147 - RNA, 19 nt, Artificial Sequence
  Synthetic
guccaggagcacggccucc

SEQ ID NO: 14148 - RNA, 21 nt, Artificial Sequence
  Synthetic
uuguccaggagcacggccucc

SEQ ID NO: 14149 - RNA, 22 nt, Artificial Sequence
  Synthetic
cuuguccaggagcacggccucc

SEQ ID NO: 14150 - RNA, 23 nt, Artificial Sequence
  Synthetic
gcuuguccaggagcacggccucc

SEQ ID NO: 14151 - RNA, 24 nt, Artificial Sequence
  Synthetic
ugcuuguccaggagcacggccucc

SEQ ID NO: 14152 - RNA, 18 nt, Artificial Sequence
  Synthetic
cgcgccagccacuccucc

SEQ ID NO: 14153 - RNA, 19 nt, Artificial Sequence
  Synthetic
ucgcgccagccacuccucc

SEQ ID NO: 14154 - RNA, 21 nt, Artificial Sequence
  Synthetic
ggucgcgccagccacuccucc

SEQ ID NO: 14155 - RNA, 22 nt, Artificial Sequence
  Synthetic
gggucgcgccagccacuccucc

SEQ ID NO: 14156 - RNA, 23 nt, Artificial Sequence
  Synthetic
ggggucgcgccagccacuccucc

SEQ ID NO: 14157 - RNA, 24 nt, Artificial Sequence
  Synthetic
aggggucgcgccagccacuccucc

SEQ ID NO: 14158 - RNA, 18 nt, Artificial Sequence
  Synthetic
gcaggcgacggcgucucc

SEQ ID NO: 14159 - RNA, 19 nt, Artificial Sequence
  Synthetic
ggcaggcgacggcgucucc

SEQ ID NO: 14160 - RNA, 21 nt, Artificial Sequence
  Synthetic
ucggcaggcgacggcgucucc

SEQ ID NO: 14161 - RNA, 22 nt, Artificial Sequence
  Synthetic
gucggcaggcgacggcgucucc

SEQ ID NO: 14162 - RNA, 23 nt, Artificial Sequence
  Synthetic
ggucggcaggcgacggcgucucc

SEQ ID NO: 14163 - RNA, 24 nt, Artificial Sequence
  Synthetic
gggucggcaggcgacggcgucucc

SEQ ID NO: 14164 - RNA, 18 nt, Artificial Sequence
  Synthetic
augcggccguacccgucc

SEQ ID NO: 14165 - RNA, 19 nt, Artificial Sequence
  Synthetic
caugcggccguacccgucc

SEQ ID NO: 14166 - RNA, 21 nt, Artificial Sequence
  Synthetic
uucaugcggccguacccgucc

SEQ ID NO: 14167 - RNA, 22 nt, Artificial Sequence
  Synthetic
guucaugcggccguacccgucc

SEQ ID NO: 14168 - RNA, 23 nt, Artificial Sequence
  Synthetic
cguucaugcggccguacccgucc

SEQ ID NO: 14169 - RNA, 24 nt, Artificial Sequence
  Synthetic
ccguucaugcggccguacccgucc

SEQ ID NO: 14170 - RNA, 18 nt, Artificial Sequence
  Synthetic
cgcgcggccacgucgucc

SEQ ID NO: 14171 - RNA, 19 nt, Artificial Sequence
  Synthetic
ccgcgcggccacgucgucc

SEQ ID NO: 14172 - RNA, 21 nt, Artificial Sequence
  Synthetic
agccgcgcggccacgucgucc

SEQ ID NO: 14173 - RNA, 22 nt, Artificial Sequence
  Synthetic
gagccgcgcggccacgucgucc

SEQ ID NO: 14174 - RNA, 23 nt, Artificial Sequence
  Synthetic
ggagccgcgcggccacgucgucc

SEQ ID NO: 14175 - RNA, 24 nt, Artificial Sequence
  Synthetic
cggagccgcgcggccacgucgucc

SEQ ID NO: 14176 - RNA, 18 nt, Artificial Sequence
  Synthetic
uccgccucgaaguggucc

SEQ ID NO: 14177 - RNA, 19 nt, Artificial Sequence
  Synthetic
cuccgccucgaaguggucc

SEQ ID NO: 14178 - RNA, 21 nt, Artificial Sequence
  Synthetic
accuccgccucgaaguggucc

SEQ ID NO: 14179 - RNA, 22 nt, Artificial Sequence
  Synthetic
caccuccgccucgaaguggucc

SEQ ID NO: 14180 - RNA, 23 nt, Artificial Sequence
  Synthetic
ccaccuccgccucgaaguggucc

SEQ ID NO: 14181 - RNA, 24 nt, Artificial Sequence
  Synthetic
accaccuccgccucgaaguggucc

SEQ ID NO: 14182 - RNA, 18 nt, Artificial Sequence
  Synthetic
gcggccugcugcuugucc

SEQ ID NO: 14183 - RNA, 19 nt, Artificial Sequence
  Synthetic
ggcggccugcugcuugucc

SEQ ID NO: 14184 - RNA, 21 nt, Artificial Sequence
  Synthetic
auggcggccugcugcuugucc

SEQ ID NO: 14185 - RNA, 22 nt, Artificial Sequence
  Synthetic
gauggcggccugcugcuugucc

SEQ ID NO: 14186 - RNA, 23 nt, Artificial Sequence
  Synthetic
ugauggcggccugcugcuugucc

SEQ ID NO: 14187 - RNA, 24 nt, Artificial Sequence
  Synthetic
uugauggcggccugcugcuugucc

SEQ ID NO: 14188 - RNA, 18 nt, Artificial Sequence
  Synthetic
aacagcuggcccaccagc

SEQ ID NO: 14189 - RNA, 19 nt, Artificial Sequence
  Synthetic
aaacagcuggcccaccagc

SEQ ID NO: 14190 - RNA, 21 nt, Artificial Sequence
  Synthetic
aaaaacagcuggcccaccagc

SEQ ID NO: 14191 - RNA, 22 nt, Artificial Sequence
  Synthetic
aaaaaacagcuggcccaccagc

SEQ ID NO: 14192 - RNA, 23 nt, Artificial Sequence
  Synthetic
uaaaaaacagcuggcccaccagc

SEQ ID NO: 14193 - RNA, 24 nt, Artificial Sequence
  Synthetic
uuaaaaaacagcuggcccaccagc

SEQ ID NO: 14194 - RNA, 18 nt, Artificial Sequence
  Synthetic
gcgggauccucggccagc

SEQ ID NO: 14195 - RNA, 19 nt, Artificial Sequence
  Synthetic
ugcgggauccucggccagc

SEQ ID NO: 14196 - RNA, 21 nt, Artificial Sequence
  Synthetic
uaugcgggauccucggccagc

SEQ ID NO: 14197 - RNA, 22 nt, Artificial Sequence
  Synthetic
guaugcgggauccucggccagc

SEQ ID NO: 14198 - RNA, 23 nt, Artificial Sequence
  Synthetic
cguaugcgggauccucggccagc

SEQ ID NO: 14199 - RNA, 24 nt, Artificial Sequence
  Synthetic
gcguaugcgggauccucggccagc

SEQ ID NO: 14200 - RNA, 18 nt, Artificial Sequence
  Synthetic
uccgucagcuuggccagc

SEQ ID NO: 14201 - RNA, 19 nt, Artificial Sequence
  Synthetic
guccgucagcuuggccagc

SEQ ID NO: 14202 - RNA, 21 nt, Artificial Sequence
  Synthetic
auguccgucagcuuggccagc

SEQ ID NO: 14203 - RNA, 22 nt, Artificial Sequence
  Synthetic
aauguccgucagcuuggccagc

SEQ ID NO: 14204 - RNA, 23 nt, Artificial Sequence
  Synthetic
aaauguccgucagcuuggccagc

SEQ ID NO: 14205 - RNA, 24 nt, Artificial Sequence
  Synthetic
uaaauguccgucagcuuggccagc

SEQ ID NO: 14206 - RNA, 18 nt, Artificial Sequence
  Synthetic
cggcguugagcuuguagc

SEQ ID NO: 14207 - RNA, 19 nt, Artificial Sequence
  Synthetic
acggcguugagcuuguagc

SEQ ID NO: 14208 - RNA, 21 nt, Artificial Sequence
  Synthetic
ccacggcguugagcuuguagc

SEQ ID NO: 14209 - RNA, 22 nt, Artificial Sequence
  Synthetic
gccacggcguugagcuuguagc

SEQ ID NO: 14210 - RNA, 23 nt, Artificial Sequence
  Synthetic
ggccacggcguugagcuuguagc

SEQ ID NO: 14211 - RNA, 24 nt, Artificial Sequence
  Synthetic
cggccacggcguugagcuuguagc

SEQ ID NO: 14212 - RNA, 18 nt, Artificial Sequence
  Synthetic
cgggcugcggccggacgc

SEQ ID NO: 14213 - RNA, 19 nt, Artificial Sequence
  Synthetic
ccgggcugcggccggacgc

SEQ ID NO: 14214 - RNA, 21 nt, Artificial Sequence
  Synthetic
ucccgggcugcggccggacgc

SEQ ID NO: 14215 - RNA, 22 nt, Artificial Sequence
  Synthetic
cucccgggcugcggccggacgc

SEQ ID NO: 14216 - RNA, 23 nt, Artificial Sequence
  Synthetic
ccucccgggcugcggccggacgc

SEQ ID NO: 14217 - RNA, 24 nt, Artificial Sequence
  Synthetic
uccucccgggcugcggccggacgc

SEQ ID NO: 14218 - RNA, 18 nt, Artificial Sequence
  Synthetic
auggcgagccagucccgc

SEQ ID NO: 14219 - RNA, 19 nt, Artificial Sequence
  Synthetic
cauggcgagccagucccgc

SEQ ID NO: 14220 - RNA, 21 nt, Artificial Sequence
  Synthetic
cgcauggcgagccagucccgc

SEQ ID NO: 14221 - RNA, 22 nt, Artificial Sequence
  Synthetic
ucgcauggcgagccagucccgc

SEQ ID NO: 14222 - RNA, 23 nt, Artificial Sequence
  Synthetic
uucgcauggcgagccagucccgc

SEQ ID NO: 14223 - RNA, 24 nt, Artificial Sequence
  Synthetic
uuucgcauggcgagccagucccgc

SEQ ID NO: 14224 - RNA, 18 nt, Artificial Sequence
  Synthetic
cggggagggcagggccgc

SEQ ID NO: 14225 - RNA, 19 nt, Artificial Sequence
  Synthetic
ccggggagggcagggccgc

SEQ ID NO: 14226 - RNA, 21 nt, Artificial Sequence
  Synthetic
ggccggggagggcagggccgc

SEQ ID NO: 14227 - RNA, 22 nt, Artificial Sequence
  Synthetic
uggccggggagggcagggccgc

SEQ ID NO: 14228 - RNA, 23 nt, Artificial Sequence
  Synthetic
uuggccggggagggcagggccgc

SEQ ID NO: 14229 - RNA, 24 nt, Artificial Sequence
  Synthetic
cuuggccggggagggcagggccgc

SEQ ID NO: 14230 - RNA, 18 nt, Artificial Sequence
  Synthetic
ugccgcggaacgacgcgc

SEQ ID NO: 14231 - RNA, 19 nt, Artificial Sequence
  Synthetic
augccgcggaacgacgcgc

SEQ ID NO: 14232 - RNA, 21 nt, Artificial Sequence
  Synthetic
agaugccgcggaacgacgcgc

SEQ ID NO: 14233 - RNA, 22 nt, Artificial Sequence
  Synthetic
gagaugccgcggaacgacgcgc

SEQ ID NO: 14234 - RNA, 23 nt, Artificial Sequence
  Synthetic
ggagaugccgcggaacgacgcgc

SEQ ID NO: 14235 - RNA, 24 nt, Artificial Sequence
  Synthetic
cggagaugccgcggaacgacgcgc

SEQ ID NO: 14236 - RNA, 18 nt, Artificial Sequence
  Synthetic
ggggcagaaacagcgcgc

SEQ ID NO: 14237 - RNA, 19 nt, Artificial Sequence
  Synthetic
gggggcagaaacagcgcgc

SEQ ID NO: 14238 - RNA, 21 nt, Artificial Sequence
  Synthetic
uggggggcagaaacagcgcgc

SEQ ID NO: 14239 - RNA, 22 nt, Artificial Sequence
  Synthetic
auggggggcagaaacagcgcgc

SEQ ID NO: 14240 - RNA, 23 nt, Artificial Sequence
  Synthetic
gauggggggcagaaacagcgcgc

SEQ ID NO: 14241 - RNA, 24 nt, Artificial Sequence
  Synthetic
ugauggggggcagaaacagcgcgc

SEQ ID NO: 14242 - RNA, 18 nt, Artificial Sequence
  Synthetic
gaaggccgcccagcgcgc

SEQ ID NO: 14243 - RNA, 19 nt, Artificial Sequence
  Synthetic
cgaaggccgcccagcgcgc

SEQ ID NO: 14244 - RNA, 21 nt, Artificial Sequence
  Synthetic
uucgaaggccgcccagcgcgc

SEQ ID NO: 14245 - RNA, 22 nt, Artificial Sequence
  Synthetic
guucgaaggccgcccagcgcgc

SEQ ID NO: 14246 - RNA, 23 nt, Artificial Sequence
  Synthetic
uguucgaaggccgcccagcgcgc

SEQ ID NO: 14247 - RNA, 24 nt, Artificial Sequence
  Synthetic
cuguucgaaggccgcccagcgcgc

SEQ ID NO: 14248 - RNA, 18 nt, Artificial Sequence
  Synthetic
uccccguagaugaugcgc

SEQ ID NO: 14249 - RNA, 19 nt, Artificial Sequence
  Synthetic
guccccguagaugaugcgc

SEQ ID NO: 14250 - RNA, 21 nt, Artificial Sequence
  Synthetic
guguccccguagaugaugcgc

SEQ ID NO: 14251 - RNA, 22 nt, Artificial Sequence
  Synthetic
cguguccccguagaugaugcgc

SEQ ID NO: 14252 - RNA, 23 nt, Artificial Sequence
  Synthetic
ccguguccccguagaugaugcgc

SEQ ID NO: 14253 - RNA, 24 nt, Artificial Sequence
  Synthetic
uccguguccccguagaugaugcgc

SEQ ID NO: 14254 - RNA, 18 nt, Artificial Sequence
  Synthetic
gggauucggggaggucgc

SEQ ID NO: 14255 - RNA, 19 nt, Artificial Sequence
  Synthetic
ugggauucggggaggucgc

SEQ ID NO: 14256 - RNA, 21 nt, Artificial Sequence
  Synthetic
ggugggauucggggaggucgc

SEQ ID NO: 14257 - RNA, 22 nt, Artificial Sequence
  Synthetic
aggugggauucggggaggucgc

SEQ ID NO: 14258 - RNA, 23 nt, Artificial Sequence
  Synthetic
caggugggauucggggaggucgc

SEQ ID NO: 14259 - RNA, 24 nt, Artificial Sequence
  Synthetic
ucaggugggauucggggaggucgc

SEQ ID NO: 14260 - RNA, 18 nt, Artificial Sequence
  Synthetic
cgccuccgggaaaucggc

SEQ ID NO: 14261 - RNA, 19 nt, Artificial Sequence
  Synthetic
ccgccuccgggaaaucggc

SEQ ID NO: 14262 - RNA, 21 nt, Artificial Sequence
  Synthetic
ggccgccuccgggaaaucggc

SEQ ID NO: 14263 - RNA, 22 nt, Artificial Sequence
  Synthetic
cggccgccuccgggaaaucggc

SEQ ID NO: 14264 - RNA, 23 nt, Artificial Sequence
  Synthetic
ucggccgccuccgggaaaucggc

SEQ ID NO: 14265 - RNA, 24 nt, Artificial Sequence
  Synthetic
gucggccgccuccgggaaaucggc

SEQ ID NO: 14266 - RNA, 18 nt, Artificial Sequence
  Synthetic
augcgcauggaauagggc

SEQ ID NO: 14267 - RNA, 19 nt, Artificial Sequence
  Synthetic
gaugcgcauggaauagggc

SEQ ID NO: 14268 - RNA, 21 nt, Artificial Sequence
  Synthetic
augaugcgcauggaauagggc

SEQ ID NO: 14269 - RNA, 22 nt, Artificial Sequence
  Synthetic
gaugaugcgcauggaauagggc

SEQ ID NO: 14270 - RNA, 23 nt, Artificial Sequence
  Synthetic
agaugaugcgcauggaauagggc

SEQ ID NO: 14271 - RNA, 24 nt, Artificial Sequence
  Synthetic
uagaugaugcgcauggaauagggc

SEQ ID NO: 14272 - RNA, 18 nt, Artificial Sequence
  Synthetic
aauuccagaaccacgggc

SEQ ID NO: 14273 - RNA, 19 nt, Artificial Sequence
  Synthetic
gaauuccagaaccacgggc

SEQ ID NO: 14274 - RNA, 21 nt, Artificial Sequence
  Synthetic
ucgaauuccagaaccacgggc

SEQ ID NO: 14275 - RNA, 22 nt, Artificial Sequence
  Synthetic
gucgaauuccagaaccacgggc

SEQ ID NO: 14276 - RNA, 23 nt, Artificial Sequence
  Synthetic
ugucgaauuccagaaccacgggc

SEQ ID NO: 14277 - RNA, 24 nt, Artificial Sequence
  Synthetic
cugucgaauuccagaaccacgggc

SEQ ID NO: 14278 - RNA, 18 nt, Artificial Sequence
  Synthetic
accagcagcuugcggggc

SEQ ID NO: 14279 - RNA, 19 nt, Artificial Sequence
  Synthetic
caccagcagcuugcggggc

SEQ ID NO: 14280 - RNA, 21 nt, Artificial Sequence
  Synthetic
gacaccagcagcuugcggggc

SEQ ID NO: 14281 - RNA, 22 nt, Artificial Sequence
  Synthetic
ggacaccagcagcuugcggggc

SEQ ID NO: 14282 - RNA, 23 nt, Artificial Sequence
  Synthetic
cggacaccagcagcuugcggggc

SEQ ID NO: 14283 - RNA, 24 nt, Artificial Sequence
  Synthetic
ucggacaccagcagcuugcggggc

SEQ ID NO: 14284 - RNA, 18 nt, Artificial Sequence
  Synthetic
cucccgggggcgcuuggc

SEQ ID NO: 14285 - RNA, 19 nt, Artificial Sequence
  Synthetic
ucucccgggggcgcuuggc

SEQ ID NO: 14286 - RNA, 21 nt, Artificial Sequence
  Synthetic
cgucucccgggggcgcuuggc

SEQ ID NO: 14287 - RNA, 22 nt, Artificial Sequence
  Synthetic
gcgucucccgggggcgcuuggc

SEQ ID NO: 14288 - RNA, 23 nt, Artificial Sequence
  Synthetic
ggcgucucccgggggcgcuuggc

SEQ ID NO: 14289 - RNA, 24 nt, Artificial Sequence
  Synthetic
cggcgucucccgggggcgcuuggc

SEQ ID NO: 14290 - RNA, 18 nt, Artificial Sequence
  Synthetic
ccgaucaccccgcguugc

SEQ ID NO: 14291 - RNA, 19 nt, Artificial Sequence
  Synthetic
gccgaucaccccgcguugc

SEQ ID NO: 14292 - RNA, 21 nt, Artificial Sequence
  Synthetic
ucgccgaucaccccgcguugc

SEQ ID NO: 14293 - RNA, 22 nt, Artificial Sequence
  Synthetic
cucgccgaucaccccgcguugc

SEQ ID NO: 14294 - RNA, 23 nt, Artificial Sequence
  Synthetic
acucgccgaucaccccgcguugc

SEQ ID NO: 14295 - RNA, 24 nt, Artificial Sequence
  Synthetic
uacucgccgaucaccccgcguugc

SEQ ID NO: 14296 - RNA, 18 nt, Artificial Sequence
  Synthetic
gccacugcgucggcccuc

SEQ ID NO: 14297 - RNA, 19 nt, Artificial Sequence
  Synthetic
cgccacugcgucggcccuc

SEQ ID NO: 14298 - RNA, 21 nt, Artificial Sequence
  Synthetic
ugcgccacugcgucggcccuc

SEQ ID NO: 14299 - RNA, 22 nt, Artificial Sequence
  Synthetic
gugcgccacugcgucggcccuc

SEQ ID NO: 14300 - RNA, 23 nt, Artificial Sequence
  Synthetic
ggugcgccacugcgucggcccuc

SEQ ID NO: 14301 - RNA, 24 nt, Artificial Sequence
  Synthetic
aggugcgccacugcgucggcccuc

SEQ ID NO: 14302 - RNA, 18 nt, Artificial Sequence
  Synthetic
gcgcaugucggccgccuc

SEQ ID NO: 14303 - RNA, 19 nt, Artificial Sequence
  Synthetic
cgcgcaugucggccgccuc

SEQ ID NO: 14304 - RNA, 21 nt, Artificial Sequence
  Synthetic
ggcgcgcaugucggccgccuc

SEQ ID NO: 14305 - RNA, 22 nt, Artificial Sequence
  Synthetic
gggcgcgcaugucggccgccuc

SEQ ID NO: 14306 - RNA, 23 nt, Artificial Sequence
  Synthetic
ggggcgcgcaugucggccgccuc

SEQ ID NO: 14307 - RNA, 24 nt, Artificial Sequence
  Synthetic
gggggcgcgcaugucggccgccuc

SEQ ID NO: 14308 - RNA, 18 nt, Artificial Sequence
  Synthetic
ggggcuuggacgcgccuc

SEQ ID NO: 14309 - RNA, 19 nt, Artificial Sequence
  Synthetic
cggggcuuggacgcgccuc

SEQ ID NO: 14310 - RNA, 21 nt, Artificial Sequence
  Synthetic
ugcggggcuuggacgcgccuc

SEQ ID NO: 14311 - RNA, 22 nt, Artificial Sequence
  Synthetic
uugcggggcuuggacgcgccuc

SEQ ID NO: 14312 - RNA, 23 nt, Artificial Sequence
  Synthetic
cuugcggggcuuggacgcgccuc

SEQ ID NO: 14313 - RNA, 24 nt, Artificial Sequence
  Synthetic
gcuugcggggcuuggacgcgccuc

SEQ ID NO: 14314 - RNA, 18 nt, Artificial Sequence
  Synthetic
uggccgcuccucguccuc

SEQ ID NO: 14315 - RNA, 19 nt, Artificial Sequence
  Synthetic
cuggccgcuccucguccuc

SEQ ID NO: 14316 - RNA, 21 nt, Artificial Sequence
  Synthetic
cucuggccgcuccucguccuc

SEQ ID NO: 14317 - RNA, 22 nt, Artificial Sequence
  Synthetic
ccucuggccgcuccucguccuc

SEQ ID NO: 14318 - RNA, 23 nt, Artificial Sequence
  Synthetic
uccucuggccgcuccucguccuc

SEQ ID NO: 14319 - RNA, 24 nt, Artificial Sequence
  Synthetic
cuccucuggccgcuccucguccuc

SEQ ID NO: 14320 - RNA, 18 nt, Artificial Sequence
  Synthetic
ggcggcggcgucuagcuc

SEQ ID NO: 14321 - RNA, 19 nt, Artificial Sequence
  Synthetic
gggcggcggcgucuagcuc

SEQ ID NO: 14322 - RNA, 21 nt, Artificial Sequence
  Synthetic
uggggcggcggcgucuagcuc

SEQ ID NO: 14323 - RNA, 22 nt, Artificial Sequence
  Synthetic
cuggggcggcggcgucuagcuc

SEQ ID NO: 14324 - RNA, 23 nt, Artificial Sequence
  Synthetic
ccuggggcggcggcgucuagcuc

SEQ ID NO: 14325 - RNA, 24 nt, Artificial Sequence
  Synthetic
cccuggggcggcggcgucuagcuc

SEQ ID NO: 14326 - RNA, 18 nt, Artificial Sequence
  Synthetic
gcguugagcuuguagcuc

SEQ ID NO: 14327 - RNA, 19 nt, Artificial Sequence
  Synthetic
ggcguugagcuuguagcuc

SEQ ID NO: 14328 - RNA, 21 nt, Artificial Sequence
  Synthetic
acggcguugagcuuguagcuc

SEQ ID NO: 14329 - RNA, 22 nt, Artificial Sequence
  Synthetic
cacggcguugagcuuguagcuc

SEQ ID NO: 14330 - RNA, 23 nt, Artificial Sequence
  Synthetic
ccacggcguugagcuuguagcuc

SEQ ID NO: 14331 - RNA, 24 nt, Artificial Sequence
  Synthetic
gccacggcguugagcuuguagcuc

SEQ ID NO: 14332 - RNA, 18 nt, Artificial Sequence
  Synthetic
cuaacgcggcggccgcuc

SEQ ID NO: 14333 - RNA, 19 nt, Artificial Sequence
  Synthetic
gcuaacgcggcggccgcuc

SEQ ID NO: 14334 - RNA, 21 nt, Artificial Sequence
  Synthetic
cggcuaacgcggcggccgcuc

SEQ ID NO: 14335 - RNA, 22 nt, Artificial Sequence
  Synthetic
ucggcuaacgcggcggccgcuc

SEQ ID NO: 14336 - RNA, 23 nt, Artificial Sequence
  Synthetic
cucggcuaacgcggcggccgcuc

SEQ ID NO: 14337 - RNA, 24 nt, Artificial Sequence
  Synthetic
gcucggcuaacgcggcggccgcuc

SEQ ID NO: 14338 - RNA, 18 nt, Artificial Sequence
  Synthetic
gccuccucggggcugcuc

SEQ ID NO: 14339 - RNA, 19 nt, Artificial Sequence
  Synthetic
ggccuccucggggcugcuc

SEQ ID NO: 14340 - RNA, 21 nt, Artificial Sequence
  Synthetic
acggccuccucggggcugcuc

SEQ ID NO: 14341 - RNA, 22 nt, Artificial Sequence
  Synthetic
cacggccuccucggggcugcuc

SEQ ID NO: 14342 - RNA, 23 nt, Artificial Sequence
  Synthetic
gcacggccuccucggggcugcuc

SEQ ID NO: 14343 - RNA, 24 nt, Artificial Sequence
  Synthetic
agcacggccuccucggggcugcuc

SEQ ID NO: 14344 - RNA, 18 nt, Artificial Sequence
  Synthetic
aaacaggaggacgugcuc

SEQ ID NO: 14345 - RNA, 19 nt, Artificial Sequence
  Synthetic
aaaacaggaggacgugcuc

SEQ ID NO: 14346 - RNA, 21 nt, Artificial Sequence
  Synthetic
cgaaaacaggaggacgugcuc

SEQ ID NO: 14347 - RNA, 22 nt, Artificial Sequence
  Synthetic
gcgaaaacaggaggacgugcuc

SEQ ID NO: 14348 - RNA, 23 nt, Artificial Sequence
  Synthetic
agcgaaaacaggaggacgugcuc

SEQ ID NO: 14349 - RNA, 24 nt, Artificial Sequence
  Synthetic
gagcgaaaacaggaggacgugcuc

SEQ ID NO: 14350 - RNA, 18 nt, Artificial Sequence
  Synthetic
ugcgcucgcagagaucuc

SEQ ID NO: 14351 - RNA, 19 nt, Artificial Sequence
  Synthetic
augcgcucgcagagaucuc

SEQ ID NO: 14352 - RNA, 21 nt, Artificial Sequence
  Synthetic
ccaugcgcucgcagagaucuc

SEQ ID NO: 14353 - RNA, 22 nt, Artificial Sequence
  Synthetic
gccaugcgcucgcagagaucuc

SEQ ID NO: 14354 - RNA, 23 nt, Artificial Sequence
  Synthetic
ggccaugcgcucgcagagaucuc

SEQ ID NO: 14355 - RNA, 24 nt, Artificial Sequence
  Synthetic
cggccaugcgcucgcagagaucuc

SEQ ID NO: 14356 - RNA, 18 nt, Artificial Sequence
  Synthetic
ggcaggcgacggcgucuc

SEQ ID NO: 14357 - RNA, 19 nt, Artificial Sequence
  Synthetic
cggcaggcgacggcgucuc

SEQ ID NO: 14358 - RNA, 21 nt, Artificial Sequence
  Synthetic
gucggcaggcgacggcgucuc

SEQ ID NO: 14359 - RNA, 22 nt, Artificial Sequence
  Synthetic
ggucggcaggcgacggcgucuc

SEQ ID NO: 14360 - RNA, 23 nt, Artificial Sequence
  Synthetic
gggucggcaggcgacggcgucuc

SEQ ID NO: 14361 - RNA, 24 nt, Artificial Sequence
  Synthetic
ggggucggcaggcgacggcgucuc

SEQ ID NO: 14362 - RNA, 18 nt, Artificial Sequence
  Synthetic
caugcggccguacccguc

SEQ ID NO: 14363 - RNA, 19 nt, Artificial Sequence
  Synthetic
ucaugcggccguacccguc

SEQ ID NO: 14364 - RNA, 21 nt, Artificial Sequence
  Synthetic
guucaugcggccguacccguc

SEQ ID NO: 14365 - RNA, 22 nt, Artificial Sequence
  Synthetic
cguucaugcggccguacccguc

SEQ ID NO: 14366 - RNA, 23 nt, Artificial Sequence
  Synthetic
ccguucaugcggccguacccguc

SEQ ID NO: 14367 - RNA, 24 nt, Artificial Sequence
  Synthetic
gccguucaugcggccguacccguc

SEQ ID NO: 14368 - RNA, 18 nt, Artificial Sequence
  Synthetic
ccgcgcggccacgucguc

SEQ ID NO: 14369 - RNA, 19 nt, Artificial Sequence
  Synthetic
gccgcgcggccacgucguc

SEQ ID NO: 14370 - RNA, 21 nt, Artificial Sequence
  Synthetic
gagccgcgcggccacgucguc

SEQ ID NO: 14371 - RNA, 22 nt, Artificial Sequence
  Synthetic
ggagccgcgcggccacgucguc

SEQ ID NO: 14372 - RNA, 23 nt, Artificial Sequence
  Synthetic
cggagccgcgcggccacgucguc

SEQ ID NO: 14373 - RNA, 24 nt, Artificial Sequence
  Synthetic
ccggagccgcgcggccacgucguc

SEQ ID NO: 14374 - RNA, 18 nt, Artificial Sequence
  Synthetic
augauguuguacccgguc

SEQ ID NO: 14375 - RNA, 19 nt, Artificial Sequence
  Synthetic
gaugauguuguacccgguc

SEQ ID NO: 14376 - RNA, 21 nt, Artificial Sequence
  Synthetic
uugaugauguuguacccgguc

SEQ ID NO: 14377 - RNA, 22 nt, Artificial Sequence
  Synthetic
guugaugauguuguacccgguc

SEQ ID NO: 14378 - RNA, 23 nt, Artificial Sequence
  Synthetic
aguugaugauguuguacccgguc

SEQ ID NO: 14379 - RNA, 24 nt, Artificial Sequence
  Synthetic
aaguugaugauguuguacccgguc

SEQ ID NO: 14380 - RNA, 18 nt, Artificial Sequence
  Synthetic
gccccgaacccugcgguc

SEQ ID NO: 14381 - RNA, 19 nt, Artificial Sequence
  Synthetic
cgccccgaacccugcgguc

SEQ ID NO: 14382 - RNA, 21 nt, Artificial Sequence
  Synthetic
accgccccgaacccugcgguc

SEQ ID NO: 14383 - RNA, 22 nt, Artificial Sequence
  Synthetic
caccgccccgaacccugcgguc

SEQ ID NO: 14384 - RNA, 23 nt, Artificial Sequence
  Synthetic
ccaccgccccgaacccugcgguc

SEQ ID NO: 14385 - RNA, 24 nt, Artificial Sequence
  Synthetic
cccaccgccccgaacccugcgguc

SEQ ID NO: 14386 - RNA, 18 nt, Artificial Sequence
  Synthetic
uacuguuucacaaggguc

SEQ ID NO: 14387 - RNA, 19 nt, Artificial Sequence
  Synthetic
guacuguuucacaaggguc

SEQ ID NO: 14388 - RNA, 21 nt, Artificial Sequence
  Synthetic
ccguacuguuucacaaggguc

SEQ ID NO: 14389 - RNA, 22 nt, Artificial Sequence
  Synthetic
gccguacuguuucacaaggguc

SEQ ID NO: 14390 - RNA, 23 nt, Artificial Sequence
  Synthetic
ggccguacuguuucacaaggguc

SEQ ID NO: 14391 - RNA, 24 nt, Artificial Sequence
  Synthetic
gggccguacuguuucacaaggguc

SEQ ID NO: 14392 - RNA, 18 nt, Artificial Sequence
  Synthetic
uggacguacucgcggguc

SEQ ID NO: 14393 - RNA, 19 nt, Artificial Sequence
  Synthetic
guggacguacucgcggguc

SEQ ID NO: 14394 - RNA, 21 nt, Artificial Sequence
  Synthetic
gcguggacguacucgcggguc

SEQ ID NO: 14395 - RNA, 22 nt, Artificial Sequence
  Synthetic
cgcguggacguacucgcggguc

SEQ ID NO: 14396 - RNA, 23 nt, Artificial Sequence
  Synthetic
gcgcguggacguacucgcggguc

SEQ ID NO: 14397 - RNA, 24 nt, Artificial Sequence
  Synthetic
cgcgcguggacguacucgcggguc

SEQ ID NO: 14398 - RNA, 18 nt, Artificial Sequence
  Synthetic
aaacccggaagugggguc

SEQ ID NO: 14399 - RNA, 19 nt, Artificial Sequence
  Synthetic
gaaacccggaagugggguc

SEQ ID NO: 14400 - RNA, 21 nt, Artificial Sequence
  Synthetic
gugaaacccggaagugggguc

SEQ ID NO: 14401 - RNA, 22 nt, Artificial Sequence
  Synthetic
cgugaaacccggaagugggguc

SEQ ID NO: 14402 - RNA, 23 nt, Artificial Sequence
  Synthetic
acgugaaacccggaagugggguc

SEQ ID NO: 14403 - RNA, 24 nt, Artificial Sequence
  Synthetic
cacgugaaacccggaagugggguc

SEQ ID NO: 14404 - RNA, 18 nt, Artificial Sequence
  Synthetic
ucgacgucgcuggauguc

SEQ ID NO: 14405 - RNA, 19 nt, Artificial Sequence
  Synthetic
cucgacgucgcuggauguc

SEQ ID NO: 14406 - RNA, 21 nt, Artificial Sequence
  Synthetic
aacucgacgucgcuggauguc

SEQ ID NO: 14407 - RNA, 22 nt, Artificial Sequence
  Synthetic
aaacucgacgucgcuggauguc

SEQ ID NO: 14408 - RNA, 23 nt, Artificial Sequence
  Synthetic
uaaacucgacgucgcuggauguc

SEQ ID NO: 14409 - RNA, 24 nt, Artificial Sequence
  Synthetic
uuaaacucgacgucgcuggauguc

SEQ ID NO: 14410 - RNA, 18 nt, Artificial Sequence
  Synthetic
ggcggccugcugcuuguc

SEQ ID NO: 14411 - RNA, 19 nt, Artificial Sequence
  Synthetic
uggcggccugcugcuuguc

SEQ ID NO: 14412 - RNA, 21 nt, Artificial Sequence
  Synthetic
gauggcggccugcugcuuguc

SEQ ID NO: 14413 - RNA, 22 nt, Artificial Sequence
  Synthetic
ugauggcggccugcugcuuguc

SEQ ID NO: 14414 - RNA, 23 nt, Artificial Sequence
  Synthetic
uugauggcggccugcugcuuguc

SEQ ID NO: 14415 - RNA, 24 nt, Artificial Sequence
  Synthetic
cuugauggcggccugcugcuuguc

SEQ ID NO: 14416 - RNA, 18 nt, Artificial Sequence
  Synthetic
gaauucgcugucgaauuc

SEQ ID NO: 14417 - RNA, 19 nt, Artificial Sequence
  Synthetic
cgaauucgcugucgaauuc

SEQ ID NO: 14418 - RNA, 21 nt, Artificial Sequence
  Synthetic
cucgaauucgcugucgaauuc

SEQ ID NO: 14419 - RNA, 22 nt, Artificial Sequence
  Synthetic
ucucgaauucgcugucgaauuc

SEQ ID NO: 14420 - RNA, 23 nt, Artificial Sequence
  Synthetic
aucucgaauucgcugucgaauuc

SEQ ID NO: 14421 - RNA, 24 nt, Artificial Sequence
  Synthetic
caucucgaauucgcugucgaauuc

SEQ ID NO: 14422 - RNA, 18 nt, Artificial Sequence
  Synthetic
cucguucaggugggauuc

SEQ ID NO: 14423 - RNA, 19 nt, Artificial Sequence
  Synthetic
gcucguucaggugggauuc

SEQ ID NO: 14424 - RNA, 21 nt, Artificial Sequence
  Synthetic
cagcucguucaggugggauuc

SEQ ID NO: 14425 - RNA, 22 nt, Artificial Sequence
  Synthetic
ccagcucguucaggugggauuc

SEQ ID NO: 14426 - RNA, 23 nt, Artificial Sequence
  Synthetic
gccagcucguucaggugggauuc

SEQ ID NO: 14427 - RNA, 24 nt, Artificial Sequence
  Synthetic
cgccagcucguucaggugggauuc

SEQ ID NO: 14428 - RNA, 18 nt, Artificial Sequence
  Synthetic
uuuaucuugcugcgcuuc

SEQ ID NO: 14429 - RNA, 19 nt, Artificial Sequence
  Synthetic
cuuuaucuugcugcgcuuc

SEQ ID NO: 14430 - RNA, 21 nt, Artificial Sequence
  Synthetic
accuuuaucuugcugcgcuuc

SEQ ID NO: 14431 - RNA, 22 nt, Artificial Sequence
  Synthetic
caccuuuaucuugcugcgcuuc

SEQ ID NO: 14432 - RNA, 23 nt, Artificial Sequence
  Synthetic
ucaccuuuaucuugcugcgcuuc

SEQ ID NO: 14433 - RNA, 24 nt, Artificial Sequence
  Synthetic
uucaccuuuaucuugcugcgcuuc

SEQ ID NO: 14434 - RNA, 18 nt, Artificial Sequence
  Synthetic
ccgcggcacagcacaaag

SEQ ID NO: 14435 - RNA, 19 nt, Artificial Sequence
  Synthetic
gccgcggcacagcacaaag

SEQ ID NO: 14436 - RNA, 21 nt, Artificial Sequence
  Synthetic
aggccgcggcacagcacaaag

SEQ ID NO: 14437 - RNA, 22 nt, Artificial Sequence
  Synthetic
gaggccgcggcacagcacaaag

SEQ ID NO: 14438 - RNA, 23 nt, Artificial Sequence
  Synthetic
ugaggccgcggcacagcacaaag

SEQ ID NO: 14439 - RNA, 24 nt, Artificial Sequence
  Synthetic
gugaggccgcggcacagcacaaag

SEQ ID NO: 14440 - RNA, 18 nt, Artificial Sequence
  Synthetic
ggguacaggcuggcaaag

SEQ ID NO: 14441 - RNA, 19 nt, Artificial Sequence
  Synthetic
gggguacaggcuggcaaag

SEQ ID NO: 14442 - RNA, 21 nt, Artificial Sequence
  Synthetic
cugggguacaggcuggcaaag

SEQ ID NO: 14443 - RNA, 22 nt, Artificial Sequence
  Synthetic
gcugggguacaggcuggcaaag

SEQ ID NO: 14444 - RNA, 23 nt, Artificial Sequence
  Synthetic
ugcugggguacaggcuggcaaag

SEQ ID NO: 14445 - RNA, 24 nt, Artificial Sequence
  Synthetic
augcugggguacaggcuggcaaag

SEQ ID NO: 14446 - RNA, 18 nt, Artificial Sequence
  Synthetic
gucagcuuggccagcaag

SEQ ID NO: 14447 - RNA, 19 nt, Artificial Sequence
  Synthetic
cgucagcuuggccagcaag

SEQ ID NO: 14448 - RNA, 21 nt, Artificial Sequence
  Synthetic
uccgucagcuuggccagcaag

SEQ ID NO: 14449 - RNA, 22 nt, Artificial Sequence
  Synthetic
guccgucagcuuggccagcaag

SEQ ID NO: 14450 - RNA, 23 nt, Artificial Sequence
  Synthetic
uguccgucagcuuggccagcaag

SEQ ID NO: 14451 - RNA, 24 nt, Artificial Sequence
  Synthetic
auguccgucagcuuggccagcaag

SEQ ID NO: 14452 - RNA, 18 nt, Artificial Sequence
  Synthetic
ggaaccgagcgaaaacag

SEQ ID NO: 14453 - RNA, 19 nt, Artificial Sequence
  Synthetic
aggaaccgagcgaaaacag

SEQ ID NO: 14454 - RNA, 21 nt, Artificial Sequence
  Synthetic
gcaggaaccgagcgaaaacag

SEQ ID NO: 14455 - RNA, 22 nt, Artificial Sequence
  Synthetic
cgcaggaaccgagcgaaaacag

SEQ ID NO: 14456 - RNA, 23 nt, Artificial Sequence
  Synthetic
ucgcaggaaccgagcgaaaacag

SEQ ID NO: 14457 - RNA, 24 nt, Artificial Sequence
  Synthetic
gucgcaggaaccgagcgaaaacag

SEQ ID NO: 14458 - RNA, 18 nt, Artificial Sequence
  Synthetic
gcacgccgcccccaacag

SEQ ID NO: 14459 - RNA, 19 nt, Artificial Sequence
  Synthetic
cgcacgccgcccccaacag

SEQ ID NO: 14460 - RNA, 21 nt, Artificial Sequence
  Synthetic
cacgcacgccgcccccaacag

SEQ ID NO: 14461 - RNA, 22 nt, Artificial Sequence
  Synthetic
ucacgcacgccgcccccaacag

SEQ ID NO: 14462 - RNA, 23 nt, Artificial Sequence
  Synthetic
gucacgcacgccgcccccaacag

SEQ ID NO: 14463 - RNA, 24 nt, Artificial Sequence
  Synthetic
ugucacgcacgccgcccccaacag

SEQ ID NO: 14464 - RNA, 18 nt, Artificial Sequence
  Synthetic
aaacagcuggcccaccag

SEQ ID NO: 14465 - RNA, 19 nt, Artificial Sequence
  Synthetic
aaaacagcuggcccaccag

SEQ ID NO: 14466 - RNA, 21 nt, Artificial Sequence
  Synthetic
aaaaaacagcuggcccaccag

SEQ ID NO: 14467 - RNA, 22 nt, Artificial Sequence
  Synthetic
uaaaaaacagcuggcccaccag

SEQ ID NO: 14468 - RNA, 23 nt, Artificial Sequence
  Synthetic
uuaaaaaacagcuggcccaccag

SEQ ID NO: 14469 - RNA, 24 nt, Artificial Sequence
  Synthetic
cuuaaaaaacagcuggcccaccag

SEQ ID NO: 14470 - RNA, 18 nt, Artificial Sequence
  Synthetic
gguuugagacgguaccag

SEQ ID NO: 14471 - RNA, 19 nt, Artificial Sequence
  Synthetic
cgguuugagacgguaccag

SEQ ID NO: 14472 - RNA, 21 nt, Artificial Sequence
  Synthetic
cccgguuugagacgguaccag

SEQ ID NO: 14473 - RNA, 22 nt, Artificial Sequence
  Synthetic
gcccgguuugagacgguaccag

SEQ ID NO: 14474 - RNA, 23 nt, Artificial Sequence
  Synthetic
ggcccgguuugagacgguaccag

SEQ ID NO: 14475 - RNA, 24 nt, Artificial Sequence
  Synthetic
cggcccgguuugagacgguaccag

SEQ ID NO: 14476 - RNA, 18 nt, Artificial Sequence
  Synthetic
gccagcaagaagggccag

SEQ ID NO: 14477 - RNA, 19 nt, Artificial Sequence
  Synthetic
ggccagcaagaagggccag

SEQ ID NO: 14478 - RNA, 21 nt, Artificial Sequence
  Synthetic
uuggccagcaagaagggccag

SEQ ID NO: 14479 - RNA, 22 nt, Artificial Sequence
  Synthetic
cuuggccagcaagaagggccag

SEQ ID NO: 14480 - RNA, 23 nt, Artificial Sequence
  Synthetic
gcuuggccagcaagaagggccag

SEQ ID NO: 14481 - RNA, 24 nt, Artificial Sequence
  Synthetic
agcuuggccagcaagaagggccag

SEQ ID NO: 14482 - RNA, 18 nt, Artificial Sequence
  Synthetic
gacggccgagagcuccag

SEQ ID NO: 14483 - RNA, 19 nt, Artificial Sequence
  Synthetic
cgacggccgagagcuccag

SEQ ID NO: 14484 - RNA, 21 nt, Artificial Sequence
  Synthetic
cgcgacggccgagagcuccag

SEQ ID NO: 14485 - RNA, 22 nt, Artificial Sequence
  Synthetic
gcgcgacggccgagagcuccag

SEQ ID NO: 14486 - RNA, 23 nt, Artificial Sequence
  Synthetic
cgcgcgacggccgagagcuccag

SEQ ID NO: 14487 - RNA, 24 nt, Artificial Sequence
  Synthetic
gcgcgcgacggccgagagcuccag

SEQ ID NO: 14488 - RNA, 18 nt, Artificial Sequence
  Synthetic
gcggccguacccguccag

SEQ ID NO: 14489 - RNA, 19 nt, Artificial Sequence
  Synthetic
ugcggccguacccguccag

SEQ ID NO: 14490 - RNA, 21 nt, Artificial Sequence
  Synthetic
caugcggccguacccguccag

SEQ ID NO: 14491 - RNA, 22 nt, Artificial Sequence
  Synthetic
ucaugcggccguacccguccag

SEQ ID NO: 14492 - RNA, 23 nt, Artificial Sequence
  Synthetic
uucaugcggccguacccguccag

SEQ ID NO: 14493 - RNA, 24 nt, Artificial Sequence
  Synthetic
guucaugcggccguacccguccag

SEQ ID NO: 14494 - RNA, 18 nt, Artificial Sequence
  Synthetic
cuuguaauacaccgucag

SEQ ID NO: 14495 - RNA, 19 nt, Artificial Sequence
  Synthetic
gcuuguaauacaccgucag

SEQ ID NO: 14496 - RNA, 21 nt, Artificial Sequence
  Synthetic
gagcuuguaauacaccgucag

SEQ ID NO: 14497 - RNA, 22 nt, Artificial Sequence
  Synthetic
ugagcuuguaauacaccgucag

SEQ ID NO: 14498 - RNA, 23 nt, Artificial Sequence
  Synthetic
augagcuuguaauacaccgucag

SEQ ID NO: 14499 - RNA, 24 nt, Artificial Sequence
  Synthetic
caugagcuuguaauacaccgucag

SEQ ID NO: 14500 - RNA, 18 nt, Artificial Sequence
  Synthetic
ggccgccagcucguucag

SEQ ID NO: 14501 - RNA, 19 nt, Artificial Sequence
  Synthetic
uggccgccagcucguucag

SEQ ID NO: 14502 - RNA, 21 nt, Artificial Sequence
  Synthetic
ccuggccgccagcucguucag

SEQ ID NO: 14503 - RNA, 22 nt, Artificial Sequence
  Synthetic
cccuggccgccagcucguucag

SEQ ID NO: 14504 - RNA, 23 nt, Artificial Sequence
  Synthetic
ccccuggccgccagcucguucag

SEQ ID NO: 14505 - RNA, 24 nt, Artificial Sequence
  Synthetic
gccccuggccgccagcucguucag

SEQ ID NO: 14506 - RNA, 18 nt, Artificial Sequence
  Synthetic
agacgcgguaaaacagag

SEQ ID NO: 14507 - RNA, 19 nt, Artificial Sequence
  Synthetic
uagacgcgguaaaacagag

SEQ ID NO: 14508 - RNA, 21 nt, Artificial Sequence
  Synthetic
cguagacgcgguaaaacagag

SEQ ID NO: 14509 - RNA, 22 nt, Artificial Sequence
  Synthetic
acguagacgcgguaaaacagag

SEQ ID NO: 14510 - RNA, 23 nt, Artificial Sequence
  Synthetic
gacguagacgcgguaaaacagag

SEQ ID NO: 14511 - RNA, 24 nt, Artificial Sequence
  Synthetic
ggacguagacgcgguaaaacagag

SEQ ID NO: 14512 - RNA, 18 nt, Artificial Sequence
  Synthetic
ggcccggcggcguaguag

SEQ ID NO: 14513 - RNA, 19 nt, Artificial Sequence
  Synthetic
gggcccggcggcguaguag

SEQ ID NO: 14514 - RNA, 21 nt, Artificial Sequence
  Synthetic
gcgggcccggcggcguaguag

SEQ ID NO: 14515 - RNA, 22 nt, Artificial Sequence
  Synthetic
cgcgggcccggcggcguaguag

SEQ ID NO: 14516 - RNA, 23 nt, Artificial Sequence
  Synthetic
gcgcgggcccggcggcguaguag

SEQ ID NO: 14517 - RNA, 24 nt, Artificial Sequence
  Synthetic
ugcgcgggcccggcggcguaguag

SEQ ID NO: 14518 - RNA, 18 nt, Artificial Sequence
  Synthetic
cgcacgugagccuugacg

SEQ ID NO: 14519 - RNA, 19 nt, Artificial Sequence
  Synthetic
ucgcacgugagccuugacg

SEQ ID NO: 14520 - RNA, 21 nt, Artificial Sequence
  Synthetic
ucucgcacgugagccuugacg

SEQ ID NO: 14521 - RNA, 22 nt, Artificial Sequence
  Synthetic
cucucgcacgugagccuugacg

SEQ ID NO: 14522 - RNA, 23 nt, Artificial Sequence
  Synthetic
ucucucgcacgugagccuugacg

SEQ ID NO: 14523 - RNA, 24 nt, Artificial Sequence
  Synthetic
cucucucgcacgugagccuugacg

SEQ ID NO: 14524 - RNA, 18 nt, Artificial Sequence
  Synthetic
cauggcgagccagucccg

SEQ ID NO: 14525 - RNA, 19 nt, Artificial Sequence
  Synthetic
gcauggcgagccagucccg

SEQ ID NO: 14526 - RNA, 21 nt, Artificial Sequence
  Synthetic
ucgcauggcgagccagucccg

SEQ ID NO: 14527 - RNA, 22 nt, Artificial Sequence
  Synthetic
uucgcauggcgagccagucccg

SEQ ID NO: 14528 - RNA, 23 nt, Artificial Sequence
  Synthetic
uuucgcauggcgagccagucccg

SEQ ID NO: 14529 - RNA, 24 nt, Artificial Sequence
  Synthetic
cuuucgcauggcgagccagucccg

SEQ ID NO: 14530 - RNA, 18 nt, Artificial Sequence
  Synthetic
cgggucggugaugcgccg

SEQ ID NO: 14531 - RNA, 19 nt, Artificial Sequence
  Synthetic
ccgggucggugaugcgccg

SEQ ID NO: 14532 - RNA, 21 nt, Artificial Sequence
  Synthetic
cuccgggucggugaugcgccg

SEQ ID NO: 14533 - RNA, 22 nt, Artificial Sequence
  Synthetic
ucuccgggucggugaugcgccg

SEQ ID NO: 14534 - RNA, 23 nt, Artificial Sequence
  Synthetic
cucuccgggucggugaugcgccg

SEQ ID NO: 14535 - RNA, 24 nt, Artificial Sequence
  Synthetic
ccucuccgggucggugaugcgccg

SEQ ID NO: 14536 - RNA, 18 nt, Artificial Sequence
  Synthetic
ccggggagggcagggccg

SEQ ID NO: 14537 - RNA, 19 nt, Artificial Sequence
  Synthetic
gccggggagggcagggccg

SEQ ID NO: 14538 - RNA, 21 nt, Artificial Sequence
  Synthetic
uggccggggagggcagggccg

SEQ ID NO: 14539 - RNA, 22 nt, Artificial Sequence
  Synthetic
uuggccggggagggcagggccg

SEQ ID NO: 14540 - RNA, 23 nt, Artificial Sequence
  Synthetic
cuuggccggggagggcagggccg

SEQ ID NO: 14541 - RNA, 24 nt, Artificial Sequence
  Synthetic
gcuuggccggggagggcagggccg

SEQ ID NO: 14542 - RNA, 18 nt, Artificial Sequence
  Synthetic
cccgggggcgcuuggccg

SEQ ID NO: 14543 - RNA, 19 nt, Artificial Sequence
  Synthetic
ucccgggggcgcuuggccg

SEQ ID NO: 14544 - RNA, 21 nt, Artificial Sequence
  Synthetic
ucucccgggggcgcuuggccg

SEQ ID NO: 14545 - RNA, 22 nt, Artificial Sequence
  Synthetic
gucucccgggggcgcuuggccg

SEQ ID NO: 14546 - RNA, 23 nt, Artificial Sequence
  Synthetic
cgucucccgggggcgcuuggccg

SEQ ID NO: 14547 - RNA, 24 nt, Artificial Sequence
  Synthetic
gcgucucccgggggcgcuuggccg

SEQ ID NO: 14548 - RNA, 18 nt, Artificial Sequence
  Synthetic
ugguccgcggagaugccg

SEQ ID NO: 14549 - RNA, 19 nt, Artificial Sequence
  Synthetic
gugguccgcggagaugccg

SEQ ID NO: 14550 - RNA, 21 nt, Artificial Sequence
  Synthetic
aagugguccgcggagaugccg

SEQ ID NO: 14551 - RNA, 22 nt, Artificial Sequence
  Synthetic
gaagugguccgcggagaugccg

SEQ ID NO: 14552 - RNA, 23 nt, Artificial Sequence
  Synthetic
cgaagugguccgcggagaugccg

SEQ ID NO: 14553 - RNA, 24 nt, Artificial Sequence
  Synthetic
ucgaagugguccgcggagaugccg

SEQ ID NO: 14554 - RNA, 18 nt, Artificial Sequence
  Synthetic
gcgccagccacuccuccg

SEQ ID NO: 14555 - RNA, 19 nt, Artificial Sequence
  Synthetic
cgcgccagccacuccuccg

SEQ ID NO: 14556 - RNA, 21 nt, Artificial Sequence
  Synthetic
gucgcgccagccacuccuccg

SEQ ID NO: 14557 - RNA, 22 nt, Artificial Sequence
  Synthetic
ggucgcgccagccacuccuccg

SEQ ID NO: 14558 - RNA, 23 nt, Artificial Sequence
  Synthetic
gggucgcgccagccacuccuccg

SEQ ID NO: 14559 - RNA, 24 nt, Artificial Sequence
  Synthetic
ggggucgcgccagccacuccuccg

SEQ ID NO: 14560 - RNA, 18 nt, Artificial Sequence
  Synthetic
ccgccucgaagugguccg

SEQ ID NO: 14561 - RNA, 19 nt, Artificial Sequence
  Synthetic
uccgccucgaagugguccg

SEQ ID NO: 14562 - RNA, 21 nt, Artificial Sequence
  Synthetic
ccuccgccucgaagugguccg

SEQ ID NO: 14563 - RNA, 22 nt, Artificial Sequence
  Synthetic
accuccgccucgaagugguccg

SEQ ID NO: 14564 - RNA, 23 nt, Artificial Sequence
  Synthetic
caccuccgccucgaagugguccg

SEQ ID NO: 14565 - RNA, 24 nt, Artificial Sequence
  Synthetic
ccaccuccgccucgaagugguccg

SEQ ID NO: 14566 - RNA, 18 nt, Artificial Sequence
  Synthetic
ggggagggcagggccgcg

SEQ ID NO: 14567 - RNA, 19 nt, Artificial Sequence
  Synthetic
cggggagggcagggccgcg

SEQ ID NO: 14568 - RNA, 21 nt, Artificial Sequence
  Synthetic
gccggggagggcagggccgcg

SEQ ID NO: 14569 - RNA, 22 nt, Artificial Sequence
  Synthetic
ggccggggagggcagggccgcg

SEQ ID NO: 14570 - RNA, 23 nt, Artificial Sequence
  Synthetic
uggccggggagggcagggccgcg

SEQ ID NO: 14571 - RNA, 24 nt, Artificial Sequence
  Synthetic
uuggccggggagggcagggccgcg

SEQ ID NO: 14572 - RNA, 18 nt, Artificial Sequence
  Synthetic
ggacgggaccugcgcgcg

SEQ ID NO: 14573 - RNA, 19 nt, Artificial Sequence
  Synthetic
uggacgggaccugcgcgcg

SEQ ID NO: 14574 - RNA, 21 nt, Artificial Sequence
  Synthetic
gauggacgggaccugcgcgcg

SEQ ID NO: 14575 - RNA, 22 nt, Artificial Sequence
  Synthetic
ugauggacgggaccugcgcgcg

SEQ ID NO: 14576 - RNA, 23 nt, Artificial Sequence
  Synthetic
uugauggacgggaccugcgcgcg

SEQ ID NO: 14577 - RNA, 24 nt, Artificial Sequence
  Synthetic
cuugauggacgggaccugcgcgcg

SEQ ID NO: 14578 - RNA, 18 nt, Artificial Sequence
  Synthetic
cgcgcccggggacucgcg

SEQ ID NO: 14579 - RNA, 19 nt, Artificial Sequence
  Synthetic
acgcgcccggggacucgcg

SEQ ID NO: 14580 - RNA, 21 nt, Artificial Sequence
  Synthetic
cgacgcgcccggggacucgcg

SEQ ID NO: 14581 - RNA, 22 nt, Artificial Sequence
  Synthetic
acgacgcgcccggggacucgcg

SEQ ID NO: 14582 - RNA, 23 nt, Artificial Sequence
  Synthetic
aacgacgcgcccggggacucgcg

SEQ ID NO: 14583 - RNA, 24 nt, Artificial Sequence
  Synthetic
gaacgacgcgcccggggacucgcg

SEQ ID NO: 14584 - RNA, 18 nt, Artificial Sequence
  Synthetic
ggcggcgucuagcucgcg

SEQ ID NO: 14585 - RNA, 19 nt, Artificial Sequence
  Synthetic
cggcggcgucuagcucgcg

SEQ ID NO: 14586 - RNA, 21 nt, Artificial Sequence
  Synthetic
ggcggcggcgucuagcucgcg

SEQ ID NO: 14587 - RNA, 22 nt, Artificial Sequence
  Synthetic
gggcggcggcgucuagcucgcg

SEQ ID NO: 14588 - RNA, 23 nt, Artificial Sequence
  Synthetic
ggggcggcggcgucuagcucgcg

SEQ ID NO: 14589 - RNA, 24 nt, Artificial Sequence
  Synthetic
uggggcggcggcgucuagcucgcg

SEQ ID NO: 14590 - RNA, 18 nt, Artificial Sequence
  Synthetic
acggcuucggccacggcg

SEQ ID NO: 14591 - RNA, 19 nt, Artificial Sequence
  Synthetic
gacggcuucggccacggcg

SEQ ID NO: 14592 - RNA, 21 nt, Artificial Sequence
  Synthetic
aggacggcuucggccacggcg

SEQ ID NO: 14593 - RNA, 22 nt, Artificial Sequence
  Synthetic
caggacggcuucggccacggcg

SEQ ID NO: 14594 - RNA, 23 nt, Artificial Sequence
  Synthetic
ucaggacggcuucggccacggcg

SEQ ID NO: 14595 - RNA, 24 nt, Artificial Sequence
  Synthetic
uucaggacggcuucggccacggcg

SEQ ID NO: 14596 - RNA, 18 nt, Artificial Sequence
  Synthetic
ugucugcucaguucggcg

SEQ ID NO: 14597 - RNA, 19 nt, Artificial Sequence
  Synthetic
gugucugcucaguucggcg

SEQ ID NO: 14598 - RNA, 21 nt, Artificial Sequence
  Synthetic
gggugucugcucaguucggcg

SEQ ID NO: 14599 - RNA, 22 nt, Artificial Sequence
  Synthetic
cgggugucugcucaguucggcg

SEQ ID NO: 14600 - RNA, 23 nt, Artificial Sequence
  Synthetic
gcgggugucugcucaguucggcg

SEQ ID NO: 14601 - RNA, 24 nt, Artificial Sequence
  Synthetic
cgcgggugucugcucaguucggcg

SEQ ID NO: 14602 - RNA, 18 nt, Artificial Sequence
  Synthetic
gcggcggcgucuagcucg

SEQ ID NO: 14603 - RNA, 19 nt, Artificial Sequence
  Synthetic
ggcggcggcgucuagcucg

SEQ ID NO: 14604 - RNA, 21 nt, Artificial Sequence
  Synthetic
ggggcggcggcgucuagcucg

SEQ ID NO: 14605 - RNA, 22 nt, Artificial Sequence
  Synthetic
uggggcggcggcgucuagcucg

SEQ ID NO: 14606 - RNA, 23 nt, Artificial Sequence
  Synthetic
cuggggcggcggcgucuagcucg

SEQ ID NO: 14607 - RNA, 24 nt, Artificial Sequence
  Synthetic
ccuggggcggcggcgucuagcucg

SEQ ID NO: 14608 - RNA, 18 nt, Artificial Sequence
  Synthetic
gccgcggccaugcgcucg

SEQ ID NO: 14609 - RNA, 19 nt, Artificial Sequence
  Synthetic
ggccgcggccaugcgcucg

SEQ ID NO: 14610 - RNA, 21 nt, Artificial Sequence
  Synthetic
agggccgcggccaugcgcucg

SEQ ID NO: 14611 - RNA, 22 nt, Artificial Sequence
  Synthetic
cagggccgcggccaugcgcucg

SEQ ID NO: 14612 - RNA, 23 nt, Artificial Sequence
  Synthetic
gcagggccgcggccaugcgcucg

SEQ ID NO: 14613 - RNA, 24 nt, Artificial Sequence
  Synthetic
cgcagggccgcggccaugcgcucg

SEQ ID NO: 14614 - RNA, 18 nt, Artificial Sequence
  Synthetic
gcgcucgcagagaucucg

SEQ ID NO: 14615 - RNA, 19 nt, Artificial Sequence
  Synthetic
ugcgcucgcagagaucucg

SEQ ID NO: 14616 - RNA, 21 nt, Artificial Sequence
  Synthetic
caugcgcucgcagagaucucg

SEQ ID NO: 14617 - RNA, 22 nt, Artificial Sequence
  Synthetic
ccaugcgcucgcagagaucucg

SEQ ID NO: 14618 - RNA, 23 nt, Artificial Sequence
  Synthetic
gccaugcgcucgcagagaucucg

SEQ ID NO: 14619 - RNA, 24 nt, Artificial Sequence
  Synthetic
ggccaugcgcucgcagagaucucg

SEQ ID NO: 14620 - RNA, 18 nt, Artificial Sequence
  Synthetic
gcggugguggacaggucg

SEQ ID NO: 14621 - RNA, 19 nt, Artificial Sequence
  Synthetic
ggcggugguggacaggucg

SEQ ID NO: 14622 - RNA, 21 nt, Artificial Sequence
  Synthetic
agggcggugguggacaggucg

SEQ ID NO: 14623 - RNA, 22 nt, Artificial Sequence
  Synthetic
cagggcggugguggacaggucg

SEQ ID NO: 14624 - RNA, 23 nt, Artificial Sequence
  Synthetic
ccagggcggugguggacaggucg

SEQ ID NO: 14625 - RNA, 24 nt, Artificial Sequence
  Synthetic
uccagggcggugguggacaggucg

SEQ ID NO: 14626 - RNA, 18 nt, Artificial Sequence
  Synthetic
ugggauucggggaggucg

SEQ ID NO: 14627 - RNA, 19 nt, Artificial Sequence
  Synthetic
gugggauucggggaggucg

SEQ ID NO: 14628 - RNA, 21 nt, Artificial Sequence
  Synthetic
aggugggauucggggaggucg

SEQ ID NO: 14629 - RNA, 22 nt, Artificial Sequence
  Synthetic
caggugggauucggggaggucg

SEQ ID NO: 14630 - RNA, 23 nt, Artificial Sequence
  Synthetic
ucaggugggauucggggaggucg

SEQ ID NO: 14631 - RNA, 24 nt, Artificial Sequence
  Synthetic
uucaggugggauucggggaggucg

SEQ ID NO: 14632 - RNA, 18 nt, Artificial Sequence
  Synthetic
ucguucaggugggauucg

SEQ ID NO: 14633 - RNA, 19 nt, Artificial Sequence
  Synthetic
cucguucaggugggauucg

SEQ ID NO: 14634 - RNA, 21 nt, Artificial Sequence
  Synthetic
agcucguucaggugggauucg

SEQ ID NO: 14635 - RNA, 22 nt, Artificial Sequence
  Synthetic
cagcucguucaggugggauucg

SEQ ID NO: 14636 - RNA, 23 nt, Artificial Sequence
  Synthetic
ccagcucguucaggugggauucg

SEQ ID NO: 14637 - RNA, 24 nt, Artificial Sequence
  Synthetic
gccagcucguucaggugggauucg

SEQ ID NO: 14638 - RNA, 18 nt, Artificial Sequence
  Synthetic
cacgccgcccccaacagg

SEQ ID NO: 14639 - RNA, 19 nt, Artificial Sequence
  Synthetic
gcacgccgcccccaacagg

SEQ ID NO: 14640 - RNA, 21 nt, Artificial Sequence
  Synthetic
acgcacgccgcccccaacagg

SEQ ID NO: 14641 - RNA, 22 nt, Artificial Sequence
  Synthetic
cacgcacgccgcccccaacagg

SEQ ID NO: 14642 - RNA, 23 nt, Artificial Sequence
  Synthetic
ucacgcacgccgcccccaacagg

SEQ ID NO: 14643 - RNA, 24 nt, Artificial Sequence
  Synthetic
gucacgcacgccgcccccaacagg

SEQ ID NO: 14644 - RNA, 18 nt, Artificial Sequence
  Synthetic
aacccgggguuguccagg

SEQ ID NO: 14645 - RNA, 19 nt, Artificial Sequence
  Synthetic
gaacccgggguuguccagg

SEQ ID NO: 14646 - RNA, 21 nt, Artificial Sequence
  Synthetic
acgaacccgggguuguccagg

SEQ ID NO: 14647 - RNA, 22 nt, Artificial Sequence
  Synthetic
gacgaacccgggguuguccagg

SEQ ID NO: 14648 - RNA, 23 nt, Artificial Sequence
  Synthetic
ugacgaacccgggguuguccagg

SEQ ID NO: 14649 - RNA, 24 nt, Artificial Sequence
  Synthetic
gugacgaacccgggguuguccagg

SEQ ID NO: 14650 - RNA, 18 nt, Artificial Sequence
  Synthetic
acugcgucggcccucagg

SEQ ID NO: 14651 - RNA, 19 nt, Artificial Sequence
  Synthetic
cacugcgucggcccucagg

SEQ ID NO: 14652 - RNA, 21 nt, Artificial Sequence
  Synthetic
gccacugcgucggcccucagg

SEQ ID NO: 14653 - RNA, 22 nt, Artificial Sequence
  Synthetic
cgccacugcgucggcccucagg

SEQ ID NO: 14654 - RNA, 23 nt, Artificial Sequence
  Synthetic
gcgccacugcgucggcccucagg

SEQ ID NO: 14655 - RNA, 24 nt, Artificial Sequence
  Synthetic
ugcgccacugcgucggcccucagg

SEQ ID NO: 14656 - RNA, 18 nt, Artificial Sequence
  Synthetic
gcccggcggcguaguagg

SEQ ID NO: 14657 - RNA, 19 nt, Artificial Sequence
  Synthetic
ggcccggcggcguaguagg

SEQ ID NO: 14658 - RNA, 21 nt, Artificial Sequence
  Synthetic
cgggcccggcggcguaguagg

SEQ ID NO: 14659 - RNA, 22 nt, Artificial Sequence
  Synthetic
gcgggcccggcggcguaguagg

SEQ ID NO: 14660 - RNA, 23 nt, Artificial Sequence
  Synthetic
cgcgggcccggcggcguaguagg

SEQ ID NO: 14661 - RNA, 24 nt, Artificial Sequence
  Synthetic
gcgcgggcccggcggcguaguagg

SEQ ID NO: 14662 - RNA, 18 nt, Artificial Sequence
  Synthetic
ggcaacgugcaggcacgg

SEQ ID NO: 14663 - RNA, 19 nt, Artificial Sequence
  Synthetic
cggcaacgugcaggcacgg

SEQ ID NO: 14664 - RNA, 21 nt, Artificial Sequence
  Synthetic
cgcggcaacgugcaggcacgg

SEQ ID NO: 14665 - RNA, 22 nt, Artificial Sequence
  Synthetic
ucgcggcaacgugcaggcacgg

SEQ ID NO: 14666 - RNA, 23 nt, Artificial Sequence
  Synthetic
gucgcggcaacgugcaggcacgg

SEQ ID NO: 14667 - RNA, 24 nt, Artificial Sequence
  Synthetic
cgucgcggcaacgugcaggcacgg

SEQ ID NO: 14668 - RNA, 18 nt, Artificial Sequence
  Synthetic
ccgccaagcgcgcgacgg

SEQ ID NO: 14669 - RNA, 19 nt, Artificial Sequence
  Synthetic
cccgccaagcgcgcgacgg

SEQ ID NO: 14670 - RNA, 21 nt, Artificial Sequence
  Synthetic
uacccgccaagcgcgcgacgg

SEQ ID NO: 14671 - RNA, 22 nt, Artificial Sequence
  Synthetic
auacccgccaagcgcgcgacgg

SEQ ID NO: 14672 - RNA, 23 nt, Artificial Sequence
  Synthetic
aauacccgccaagcgcgcgacgg

SEQ ID NO: 14673 - RNA, 24 nt, Artificial Sequence
  Synthetic
uaauacccgccaagcgcgcgacgg

SEQ ID NO: 14674 - RNA, 18 nt, Artificial Sequence
  Synthetic
ggccaucggggccgccgg

SEQ ID NO: 14675 - RNA, 19 nt, Artificial Sequence
  Synthetic
aggccaucggggccgccgg

SEQ ID NO: 14676 - RNA, 21 nt, Artificial Sequence
  Synthetic
gaaggccaucggggccgccgg

SEQ ID NO: 14677 - RNA, 22 nt, Artificial Sequence
  Synthetic
cgaaggccaucggggccgccgg

SEQ ID NO: 14678 - RNA, 23 nt, Artificial Sequence
  Synthetic
ccgaaggccaucggggccgccgg

SEQ ID NO: 14679 - RNA, 24 nt, Artificial Sequence
  Synthetic
cccgaaggccaucggggccgccgg

SEQ ID NO: 14680 - RNA, 18 nt, Artificial Sequence
  Synthetic
gggagggcagggccgcgg

SEQ ID NO: 14681 - RNA, 19 nt, Artificial Sequence
  Synthetic
ggggagggcagggccgcgg

SEQ ID NO: 14682 - RNA, 21 nt, Artificial Sequence
  Synthetic
ccggggagggcagggccgcgg

SEQ ID NO: 14683 - RNA, 22 nt, Artificial Sequence
  Synthetic
gccggggagggcagggccgcgg

SEQ ID NO: 14684 - RNA, 23 nt, Artificial Sequence
  Synthetic
ggccggggagggcagggccgcgg

SEQ ID NO: 14685 - RNA, 24 nt, Artificial Sequence
  Synthetic
uggccggggagggcagggccgcgg

SEQ ID NO: 14686 - RNA, 18 nt, Artificial Sequence
  Synthetic
cguccucccgggcugcgg

SEQ ID NO: 14687 - RNA, 19 nt, Artificial Sequence
  Synthetic
ucguccucccgggcugcgg

SEQ ID NO: 14688 - RNA, 21 nt, Artificial Sequence
  Synthetic
ccucguccucccgggcugcgg

SEQ ID NO: 14689 - RNA, 22 nt, Artificial Sequence
  Synthetic
uccucguccucccgggcugcgg

SEQ ID NO: 14690 - RNA, 23 nt, Artificial Sequence
  Synthetic
cuccucguccucccgggcugcgg

SEQ ID NO: 14691 - RNA, 24 nt, Artificial Sequence
  Synthetic
gcuccucguccucccgggcugcgg

SEQ ID NO: 14692 - RNA, 18 nt, Artificial Sequence
  Synthetic
gcgcuuggccggggaggg

SEQ ID NO: 14693 - RNA, 19 nt, Artificial Sequence
  Synthetic
ggcgcuuggccggggaggg

SEQ ID NO: 14694 - RNA, 21 nt, Artificial Sequence
  Synthetic
ggggcgcuuggccggggaggg

SEQ ID NO: 14695 - RNA, 22 nt, Artificial Sequence
  Synthetic
gggggcgcuuggccggggaggg

SEQ ID NO: 14696 - RNA, 23 nt, Artificial Sequence
  Synthetic
cgggggcgcuuggccggggaggg

SEQ ID NO: 14697 - RNA, 24 nt, Artificial Sequence
  Synthetic
ccgggggcgcuuggccggggaggg

SEQ ID NO: 14698 - RNA, 18 nt, Artificial Sequence
  Synthetic
uacuucuugauggccggg

SEQ ID NO: 14699 - RNA, 19 nt, Artificial Sequence
  Synthetic
guacuucuugauggccggg

SEQ ID NO: 14700 - RNA, 21 nt, Artificial Sequence
  Synthetic
ucguacuucuugauggccggg

SEQ ID NO: 14701 - RNA, 22 nt, Artificial Sequence
  Synthetic
cucguacuucuugauggccggg

SEQ ID NO: 14702 - RNA, 23 nt, Artificial Sequence
  Synthetic
ccucguacuucuugauggccggg

SEQ ID NO: 14703 - RNA, 24 nt, Artificial Sequence
  Synthetic
cccucguacuucuugauggccggg

SEQ ID NO: 14704 - RNA, 18 nt, Artificial Sequence
  Synthetic
cgggggcgcuuggccggg

SEQ ID NO: 14705 - RNA, 19 nt, Artificial Sequence
  Synthetic
ccgggggcgcuuggccggg

SEQ ID NO: 14706 - RNA, 21 nt, Artificial Sequence
  Synthetic
ucccgggggcgcuuggccggg

SEQ ID NO: 14707 - RNA, 22 nt, Artificial Sequence
  Synthetic
cucccgggggcgcuuggccggg

SEQ ID NO: 14708 - RNA, 23 nt, Artificial Sequence
  Synthetic
ucucccgggggcgcuuggccggg

SEQ ID NO: 14709 - RNA, 24 nt, Artificial Sequence
  Synthetic
gucucccgggggcgcuuggccggg

SEQ ID NO: 14710 - RNA, 18 nt, Artificial Sequence
  Synthetic
ggagggcagggccgcggg

SEQ ID NO: 14711 - RNA, 19 nt, Artificial Sequence
  Synthetic
gggagggcagggccgcggg

SEQ ID NO: 14712 - RNA, 21 nt, Artificial Sequence
  Synthetic
cggggagggcagggccgcggg

SEQ ID NO: 14713 - RNA, 22 nt, Artificial Sequence
  Synthetic
ccggggagggcagggccgcggg

SEQ ID NO: 14714 - RNA, 23 nt, Artificial Sequence
  Synthetic
gccggggagggcagggccgcggg

SEQ ID NO: 14715 - RNA, 24 nt, Artificial Sequence
  Synthetic
ggccggggagggcagggccgcggg

SEQ ID NO: 14716 - RNA, 18 nt, Artificial Sequence
  Synthetic
cgccugcagucccucggg

SEQ ID NO: 14717 - RNA, 19 nt, Artificial Sequence
  Synthetic
acgccugcagucccucggg

SEQ ID NO: 14718 - RNA, 21 nt, Artificial Sequence
  Synthetic
gaacgccugcagucccucggg

SEQ ID NO: 14719 - RNA, 22 nt, Artificial Sequence
  Synthetic
cgaacgccugcagucccucggg

SEQ ID NO: 14720 - RNA, 23 nt, Artificial Sequence
  Synthetic
ccgaacgccugcagucccucggg

SEQ ID NO: 14721 - RNA, 24 nt, Artificial Sequence
  Synthetic
cccgaacgccugcagucccucggg

SEQ ID NO: 14722 - RNA, 18 nt, Artificial Sequence
  Synthetic
ggcagggccgcggggggg

SEQ ID NO: 14723 - RNA, 19 nt, Artificial Sequence
  Synthetic
gggcagggccgcggggggg

SEQ ID NO: 14724 - RNA, 21 nt, Artificial Sequence
  Synthetic
gagggcagggccgcggggggg

SEQ ID NO: 14725 - RNA, 22 nt, Artificial Sequence
  Synthetic
ggagggcagggccgcggggggg

SEQ ID NO: 14726 - RNA, 23 nt, Artificial Sequence
  Synthetic
gggagggcagggccgcggggggg

SEQ ID NO: 14727 - RNA, 24 nt, Artificial Sequence
  Synthetic
ggggagggcagggccgcggggggg

SEQ ID NO: 14728 - RNA, 18 nt, Artificial Sequence
  Synthetic
cucgaguuugaugggggg

SEQ ID NO: 14729 - RNA, 19 nt, Artificial Sequence
  Synthetic
acucgaguuugaugggggg

SEQ ID NO: 14730 - RNA, 21 nt, Artificial Sequence
  Synthetic
gcacucgaguuugaugggggg

SEQ ID NO: 14731 - RNA, 22 nt, Artificial Sequence
  Synthetic
cgcacucgaguuugaugggggg

SEQ ID NO: 14732 - RNA, 23 nt, Artificial Sequence
  Synthetic
ucgcacucgaguuugaugggggg

SEQ ID NO: 14733 - RNA, 24 nt, Artificial Sequence
  Synthetic
uucgcacucgaguuugaugggggg

SEQ ID NO: 14734 - RNA, 18 nt, Artificial Sequence
  Synthetic
ggauccgguccuugaugg

SEQ ID NO: 14735 - RNA, 19 nt, Artificial Sequence
  Synthetic
gggauccgguccuugaugg

SEQ ID NO: 14736 - RNA, 21 nt, Artificial Sequence
  Synthetic
acgggauccgguccuugaugg

SEQ ID NO: 14737 - RNA, 22 nt, Artificial Sequence
  Synthetic
uacgggauccgguccuugaugg

SEQ ID NO: 14738 - RNA, 23 nt, Artificial Sequence
  Synthetic
guacgggauccgguccuugaugg

SEQ ID NO: 14739 - RNA, 24 nt, Artificial Sequence
  Synthetic
cguacgggauccgguccuugaugg

SEQ ID NO: 14740 - RNA, 18 nt, Artificial Sequence
  Synthetic
ccucguacuucuugaugg

SEQ ID NO: 14741 - RNA, 19 nt, Artificial Sequence
  Synthetic
cccucguacuucuugaugg

SEQ ID NO: 14742 - RNA, 21 nt, Artificial Sequence
  Synthetic
cacccucguacuucuugaugg

SEQ ID NO: 14743 - RNA, 22 nt, Artificial Sequence
  Synthetic
ccacccucguacuucuugaugg

SEQ ID NO: 14744 - RNA, 23 nt, Artificial Sequence
  Synthetic
cccacccucguacuucuugaugg

SEQ ID NO: 14745 - RNA, 24 nt, Artificial Sequence
  Synthetic
ccccacccucguacuucuugaugg

SEQ ID NO: 14746 - RNA, 18 nt, Artificial Sequence
  Synthetic
gccgcccccaacaggugg

SEQ ID NO: 14747 - RNA, 19 nt, Artificial Sequence
  Synthetic
cgccgcccccaacaggugg

SEQ ID NO: 14748 - RNA, 21 nt, Artificial Sequence
  Synthetic
cacgccgcccccaacaggugg

SEQ ID NO: 14749 - RNA, 22 nt, Artificial Sequence
  Synthetic
gcacgccgcccccaacaggugg

SEQ ID NO: 14750 - RNA, 23 nt, Artificial Sequence
  Synthetic
cgcacgccgcccccaacaggugg

SEQ ID NO: 14751 - RNA, 24 nt, Artificial Sequence
  Synthetic
acgcacgccgcccccaacaggugg

SEQ ID NO: 14752 - RNA, 18 nt, Artificial Sequence
  Synthetic
ucucccgggggcgcuugg

SEQ ID NO: 14753 - RNA, 19 nt, Artificial Sequence
  Synthetic
gucucccgggggcgcuugg

SEQ ID NO: 14754 - RNA, 21 nt, Artificial Sequence
  Synthetic
gcgucucccgggggcgcuugg

SEQ ID NO: 14755 - RNA, 22 nt, Artificial Sequence
  Synthetic
ggcgucucccgggggcgcuugg

SEQ ID NO: 14756 - RNA, 23 nt, Artificial Sequence
  Synthetic
cggcgucucccgggggcgcuugg

SEQ ID NO: 14757 - RNA, 24 nt, Artificial Sequence
  Synthetic
acggcgucucccgggggcgcuugg

SEQ ID NO: 14758 - RNA, 18 nt, Artificial Sequence
  Synthetic
cggaucugcuuucgcaug

SEQ ID NO: 14759 - RNA, 19 nt, Artificial Sequence
  Synthetic
gcggaucugcuuucgcaug

SEQ ID NO: 14760 - RNA, 21 nt, Artificial Sequence
  Synthetic
gagcggaucugcuuucgcaug

SEQ ID NO: 14761 - RNA, 22 nt, Artificial Sequence
  Synthetic
cgagcggaucugcuuucgcaug

SEQ ID NO: 14762 - RNA, 23 nt, Artificial Sequence
  Synthetic
gcgagcggaucugcuuucgcaug

SEQ ID NO: 14763 - RNA, 24 nt, Artificial Sequence
  Synthetic
cgcgagcggaucugcuuucgcaug

SEQ ID NO: 14764 - RNA, 18 nt, Artificial Sequence
  Synthetic
cagucccgcaggaggaug

SEQ ID NO: 14765 - RNA, 19 nt, Artificial Sequence
  Synthetic
ccagucccgcaggaggaug

SEQ ID NO: 14766 - RNA, 21 nt, Artificial Sequence
  Synthetic
agccagucccgcaggaggaug

SEQ ID NO: 14767 - RNA, 22 nt, Artificial Sequence
  Synthetic
gagccagucccgcaggaggaug

SEQ ID NO: 14768 - RNA, 23 nt, Artificial Sequence
  Synthetic
cgagccagucccgcaggaggaug

SEQ ID NO: 14769 - RNA, 24 nt, Artificial Sequence
  Synthetic
gcgagccagucccgcaggaggaug

SEQ ID NO: 14770 - RNA, 18 nt, Artificial Sequence
  Synthetic
uugugggccuggaugaug

SEQ ID NO: 14771 - RNA, 19 nt, Artificial Sequence
  Synthetic
guugugggccuggaugaug

SEQ ID NO: 14772 - RNA, 21 nt, Artificial Sequence
  Synthetic
agguugugggccuggaugaug

SEQ ID NO: 14773 - RNA, 22 nt, Artificial Sequence
  Synthetic
cagguugugggccuggaugaug

SEQ ID NO: 14774 - RNA, 23 nt, Artificial Sequence
  Synthetic
acagguugugggccuggaugaug

SEQ ID NO: 14775 - RNA, 24 nt, Artificial Sequence
  Synthetic
cacagguugugggccuggaugaug

SEQ ID NO: 14776 - RNA, 18 nt, Artificial Sequence
  Synthetic
ucgcacucgaguuugaug

SEQ ID NO: 14777 - RNA, 19 nt, Artificial Sequence
  Synthetic
uucgcacucgaguuugaug

SEQ ID NO: 14778 - RNA, 21 nt, Artificial Sequence
  Synthetic
uuuucgcacucgaguuugaug

SEQ ID NO: 14779 - RNA, 22 nt, Artificial Sequence
  Synthetic
cuuuucgcacucgaguuugaug

SEQ ID NO: 14780 - RNA, 23 nt, Artificial Sequence
  Synthetic
ucuuuucgcacucgaguuugaug

SEQ ID NO: 14781 - RNA, 24 nt, Artificial Sequence
  Synthetic
gucuuuucgcacucgaguuugaug

SEQ ID NO: 14782 - RNA, 18 nt, Artificial Sequence
  Synthetic
ucccgcaggaggaugcug

SEQ ID NO: 14783 - RNA, 19 nt, Artificial Sequence
  Synthetic
gucccgcaggaggaugcug

SEQ ID NO: 14784 - RNA, 21 nt, Artificial Sequence
  Synthetic
cagucccgcaggaggaugcug

SEQ ID NO: 14785 - RNA, 22 nt, Artificial Sequence
  Synthetic
ccagucccgcaggaggaugcug

SEQ ID NO: 14786 - RNA, 23 nt, Artificial Sequence
  Synthetic
gccagucccgcaggaggaugcug

SEQ ID NO: 14787 - RNA, 24 nt, Artificial Sequence
  Synthetic
agccagucccgcaggaggaugcug

SEQ ID NO: 14788 - RNA, 18 nt, Artificial Sequence
  Synthetic
gcccucagggagagcgug

SEQ ID NO: 14789 - RNA, 19 nt, Artificial Sequence
  Synthetic
ggcccucagggagagcgug

SEQ ID NO: 14790 - RNA, 21 nt, Artificial Sequence
  Synthetic
ucggcccucagggagagcgug

SEQ ID NO: 14791 - RNA, 22 nt, Artificial Sequence
  Synthetic
gucggcccucagggagagcgug

SEQ ID NO: 14792 - RNA, 23 nt, Artificial Sequence
  Synthetic
cgucggcccucagggagagcgug

SEQ ID NO: 14793 - RNA, 24 nt, Artificial Sequence
  Synthetic
gcgucggcccucagggagagcgug

SEQ ID NO: 14794 - RNA, 18 nt, Artificial Sequence
  Synthetic
cgguaccagccgaaggug

SEQ ID NO: 14795 - RNA, 19 nt, Artificial Sequence
  Synthetic
acgguaccagccgaaggug

SEQ ID NO: 14796 - RNA, 21 nt, Artificial Sequence
  Synthetic
agacgguaccagccgaaggug

SEQ ID NO: 14797 - RNA, 22 nt, Artificial Sequence
  Synthetic
gagacgguaccagccgaaggug

SEQ ID NO: 14798 - RNA, 23 nt, Artificial Sequence
  Synthetic
ugagacgguaccagccgaaggug

SEQ ID NO: 14799 - RNA, 24 nt, Artificial Sequence
  Synthetic
uugagacgguaccagccgaaggug

SEQ ID NO: 14800 - RNA, 18 nt, Artificial Sequence
  Synthetic
acgugcuccagggcggug

SEQ ID NO: 14801 - RNA, 19 nt, Artificial Sequence
  Synthetic
gacgugcuccagggcggug

SEQ ID NO: 14802 - RNA, 21 nt, Artificial Sequence
  Synthetic
aggacgugcuccagggcggug

SEQ ID NO: 14803 - RNA, 22 nt, Artificial Sequence
  Synthetic
gaggacgugcuccagggcggug

SEQ ID NO: 14804 - RNA, 23 nt, Artificial Sequence
  Synthetic
ggaggacgugcuccagggcggug

SEQ ID NO: 14805 - RNA, 24 nt, Artificial Sequence
  Synthetic
aggaggacgugcuccagggcggug

SEQ ID NO: 14806 - RNA, 18 nt, Artificial Sequence
  Synthetic
accagauccacgcccuug

SEQ ID NO: 14807 - RNA, 19 nt, Artificial Sequence
  Synthetic
caccagauccacgcccuug

SEQ ID NO: 14808 - RNA, 21 nt, Artificial Sequence
  Synthetic
cgcaccagauccacgcccuug

SEQ ID NO: 14809 - RNA, 22 nt, Artificial Sequence
  Synthetic
gcgcaccagauccacgcccuug

SEQ ID NO: 14810 - RNA, 23 nt, Artificial Sequence
  Synthetic
ugcgcaccagauccacgcccuug

SEQ ID NO: 14811 - RNA, 24 nt, Artificial Sequence
  Synthetic
uugcgcaccagauccacgcccuug

SEQ ID NO: 14812 - RNA, 18 nt, Artificial Sequence
  Synthetic
ucucgcacgugagccuug

SEQ ID NO: 14813 - RNA, 19 nt, Artificial Sequence
  Synthetic
cucucgcacgugagccuug

SEQ ID NO: 14814 - RNA, 21 nt, Artificial Sequence
  Synthetic
cucucucgcacgugagccuug

SEQ ID NO: 14815 - RNA, 22 nt, Artificial Sequence
  Synthetic
gcucucucgcacgugagccuug

SEQ ID NO: 14816 - RNA, 23 nt, Artificial Sequence
  Synthetic
ggcucucucgcacgugagccuug

SEQ ID NO: 14817 - RNA, 24 nt, Artificial Sequence
  Synthetic
aggcucucucgcacgugagccuug

SEQ ID NO: 14818 - RNA, 18 nt, Artificial Sequence
  Synthetic
uacgggauccgguccuug

SEQ ID NO: 14819 - RNA, 19 nt, Artificial Sequence
  Synthetic
guacgggauccgguccuug

SEQ ID NO: 14820 - RNA, 21 nt, Artificial Sequence
  Synthetic
acguacgggauccgguccuug

SEQ ID NO: 14821 - RNA, 22 nt, Artificial Sequence
  Synthetic
cacguacgggauccgguccuug

SEQ ID NO: 14822 - RNA, 23 nt, Artificial Sequence
  Synthetic
ucacguacgggauccgguccuug

SEQ ID NO: 14823 - RNA, 24 nt, Artificial Sequence
  Synthetic
aucacguacgggauccgguccuug

SEQ ID NO: 14824 - RNA, 18 nt, Artificial Sequence
  Synthetic
ucggacaccagcagcuug

SEQ ID NO: 14825 - RNA, 19 nt, Artificial Sequence
  Synthetic
cucggacaccagcagcuug

SEQ ID NO: 14826 - RNA, 21 nt, Artificial Sequence
  Synthetic
agcucggacaccagcagcuug

SEQ ID NO: 14827 - RNA, 22 nt, Artificial Sequence
  Synthetic
cagcucggacaccagcagcuug

SEQ ID NO: 14828 - RNA, 23 nt, Artificial Sequence
  Synthetic
ccagcucggacaccagcagcuug

SEQ ID NO: 14829 - RNA, 24 nt, Artificial Sequence
  Synthetic
gccagcucggacaccagcagcuug

SEQ ID NO: 14830 - RNA, 18 nt, Artificial Sequence
  Synthetic
gcgaucagcagcagcuug

SEQ ID NO: 14831 - RNA, 19 nt, Artificial Sequence
  Synthetic
ggcgaucagcagcagcuug

SEQ ID NO: 14832 - RNA, 21 nt, Artificial Sequence
  Synthetic
uuggcgaucagcagcagcuug

SEQ ID NO: 14833 - RNA, 22 nt, Artificial Sequence
  Synthetic
cuuggcgaucagcagcagcuug

SEQ ID NO: 14834 - RNA, 23 nt, Artificial Sequence
  Synthetic
ucuuggcgaucagcagcagcuug

SEQ ID NO: 14835 - RNA, 24 nt, Artificial Sequence
  Synthetic
uucuuggcgaucagcagcagcuug

SEQ ID NO: 14836 - RNA, 18 nt, Artificial Sequence
  Synthetic
uuuucgcacucgaguuug

SEQ ID NO: 14837 - RNA, 19 nt, Artificial Sequence
  Synthetic
cuuuucgcacucgaguuug

SEQ ID NO: 14838 - RNA, 21 nt, Artificial Sequence
  Synthetic
gucuuuucgcacucgaguuug

SEQ ID NO: 14839 - RNA, 22 nt, Artificial Sequence
  Synthetic
cgucuuuucgcacucgaguuug

SEQ ID NO: 14840 - RNA, 23 nt, Artificial Sequence
  Synthetic
acgucuuuucgcacucgaguuug

SEQ ID NO: 14841 - RNA, 24 nt, Artificial Sequence
  Synthetic
aacgucuuuucgcacucgaguuug

SEQ ID NO: 14842 - RNA, 18 nt, Artificial Sequence
  Synthetic
ggaugucccgaaggccau

SEQ ID NO: 14843 - RNA, 19 nt, Artificial Sequence
  Synthetic
uggaugucccgaaggccau

SEQ ID NO: 14844 - RNA, 21 nt, Artificial Sequence
  Synthetic
gcuggaugucccgaaggccau

SEQ ID NO: 14845 - RNA, 22 nt, Artificial Sequence
  Synthetic
cgcuggaugucccgaaggccau

SEQ ID NO: 14846 - RNA, 23 nt, Artificial Sequence
  Synthetic
ucgcuggaugucccgaaggccau

SEQ ID NO: 14847 - RNA, 24 nt, Artificial Sequence
  Synthetic
gucgcuggaugucccgaaggccau

SEQ ID NO: 14848 - RNA, 18 nt, Artificial Sequence
  Synthetic
agcucguucaggugggau

SEQ ID NO: 14849 - RNA, 19 nt, Artificial Sequence
  Synthetic
cagcucguucaggugggau

SEQ ID NO: 14850 - RNA, 21 nt, Artificial Sequence
  Synthetic
gccagcucguucaggugggau

SEQ ID NO: 14851 - RNA, 22 nt, Artificial Sequence
  Synthetic
cgccagcucguucaggugggau

SEQ ID NO: 14852 - RNA, 23 nt, Artificial Sequence
  Synthetic
ccgccagcucguucaggugggau

SEQ ID NO: 14853 - RNA, 24 nt, Artificial Sequence
  Synthetic
gccgccagcucguucaggugggau

SEQ ID NO: 14854 - RNA, 18 nt, Artificial Sequence
  Synthetic
uucgcacucgaguuugau

SEQ ID NO: 14855 - RNA, 19 nt, Artificial Sequence
  Synthetic
uuucgcacucgaguuugau

SEQ ID NO: 14856 - RNA, 21 nt, Artificial Sequence
  Synthetic
cuuuucgcacucgaguuugau

SEQ ID NO: 14857 - RNA, 22 nt, Artificial Sequence
  Synthetic
ucuuuucgcacucgaguuugau

SEQ ID NO: 14858 - RNA, 23 nt, Artificial Sequence
  Synthetic
gucuuuucgcacucgaguuugau

SEQ ID NO: 14859 - RNA, 24 nt, Artificial Sequence
  Synthetic
cgucuuuucgcacucgaguuugau

SEQ ID NO: 14860 - RNA, 18 nt, Artificial Sequence
  Synthetic
ccgugggcaauggcguau

SEQ ID NO: 14861 - RNA, 19 nt, Artificial Sequence
  Synthetic
gccgugggcaauggcguau

SEQ ID NO: 14862 - RNA, 21 nt, Artificial Sequence
  Synthetic
acgccgugggcaauggcguau

SEQ ID NO: 14863 - RNA, 22 nt, Artificial Sequence
  Synthetic
gacgccgugggcaauggcguau

SEQ ID NO: 14864 - RNA, 23 nt, Artificial Sequence
  Synthetic
cgacgccgugggcaauggcguau

SEQ ID NO: 14865 - RNA, 24 nt, Artificial Sequence
  Synthetic
gcgacgccgugggcaauggcguau

SEQ ID NO: 14866 - RNA, 18 nt, Artificial Sequence
  Synthetic
uguacccggucacgaacu

SEQ ID NO: 14867 - RNA, 19 nt, Artificial Sequence
  Synthetic
uuguacccggucacgaacu

SEQ ID NO: 14868 - RNA, 21 nt, Artificial Sequence
  Synthetic
uguuguacccggucacgaacu

SEQ ID NO: 14869 - RNA, 22 nt, Artificial Sequence
  Synthetic
auguuguacccggucacgaacu

SEQ ID NO: 14870 - RNA, 23 nt, Artificial Sequence
  Synthetic
gauguuguacccggucacgaacu

SEQ ID NO: 14871 - RNA, 24 nt, Artificial Sequence
  Synthetic
ugauguuguacccggucacgaacu

SEQ ID NO: 14872 - RNA, 18 nt, Artificial Sequence
  Synthetic
uccggggggugccacacu

SEQ ID NO: 14873 - RNA, 19 nt, Artificial Sequence
  Synthetic
guccggggggugccacacu

SEQ ID NO: 14874 - RNA, 21 nt, Artificial Sequence
  Synthetic
ucguccggggggugccacacu

SEQ ID NO: 14875 - RNA, 22 nt, Artificial Sequence
  Synthetic
gucguccggggggugccacacu

SEQ ID NO: 14876 - RNA, 23 nt, Artificial Sequence
  Synthetic
cgucguccggggggugccacacu

SEQ ID NO: 14877 - RNA, 24 nt, Artificial Sequence
  Synthetic
acgucguccggggggugccacacu

SEQ ID NO: 14878 - RNA, 18 nt, Artificial Sequence
  Synthetic
cgccacugcgucggcccu

SEQ ID NO: 14879 - RNA, 19 nt, Artificial Sequence
  Synthetic
gcgccacugcgucggcccu

SEQ ID NO: 14880 - RNA, 21 nt, Artificial Sequence
  Synthetic
gugcgccacugcgucggcccu

SEQ ID NO: 14881 - RNA, 22 nt, Artificial Sequence
  Synthetic
ggugcgccacugcgucggcccu

SEQ ID NO: 14882 - RNA, 23 nt, Artificial Sequence
  Synthetic
aggugcgccacugcgucggcccu

SEQ ID NO: 14883 - RNA, 24 nt, Artificial Sequence
  Synthetic
caggugcgccacugcgucggcccu

SEQ ID NO: 14884 - RNA, 18 nt, Artificial Sequence
  Synthetic
cgcgcaugucggccgccu

SEQ ID NO: 14885 - RNA, 19 nt, Artificial Sequence
  Synthetic
gcgcgcaugucggccgccu

SEQ ID NO: 14886 - RNA, 21 nt, Artificial Sequence
  Synthetic
gggcgcgcaugucggccgccu

SEQ ID NO: 14887 - RNA, 22 nt, Artificial Sequence
  Synthetic
ggggcgcgcaugucggccgccu

SEQ ID NO: 14888 - RNA, 23 nt, Artificial Sequence
  Synthetic
gggggcgcgcaugucggccgccu

SEQ ID NO: 14889 - RNA, 24 nt, Artificial Sequence
  Synthetic
cgggggcgcgcaugucggccgccu

SEQ ID NO: 14890 - RNA, 18 nt, Artificial Sequence
  Synthetic
ccaggagcacggccuccu

SEQ ID NO: 14891 - RNA, 19 nt, Artificial Sequence
  Synthetic
uccaggagcacggccuccu

SEQ ID NO: 14892 - RNA, 21 nt, Artificial Sequence
  Synthetic
uguccaggagcacggccuccu

SEQ ID NO: 14893 - RNA, 22 nt, Artificial Sequence
  Synthetic
uuguccaggagcacggccuccu

SEQ ID NO: 14894 - RNA, 23 nt, Artificial Sequence
  Synthetic
cuuguccaggagcacggccuccu

SEQ ID NO: 14895 - RNA, 24 nt, Artificial Sequence
  Synthetic
gcuuguccaggagcacggccuccu

SEQ ID NO: 14896 - RNA, 18 nt, Artificial Sequence
  Synthetic
cgacagcacacgcccgcu

SEQ ID NO: 14897 - RNA, 19 nt, Artificial Sequence
  Synthetic
acgacagcacacgcccgcu

SEQ ID NO: 14898 - RNA, 21 nt, Artificial Sequence
  Synthetic
guacgacagcacacgcccgcu

SEQ ID NO: 14899 - RNA, 22 nt, Artificial Sequence
  Synthetic
gguacgacagcacacgcccgcu

SEQ ID NO: 14900 - RNA, 23 nt, Artificial Sequence
  Synthetic
agguacgacagcacacgcccgcu

SEQ ID NO: 14901 - RNA, 24 nt, Artificial Sequence
  Synthetic
cagguacgacagcacacgcccgcu

SEQ ID NO: 14902 - RNA, 18 nt, Artificial Sequence
  Synthetic
gcuaacgcggcggccgcu

SEQ ID NO: 14903 - RNA, 19 nt, Artificial Sequence
  Synthetic
ggcuaacgcggcggccgcu

SEQ ID NO: 14904 - RNA, 21 nt, Artificial Sequence
  Synthetic
ucggcuaacgcggcggccgcu

SEQ ID NO: 14905 - RNA, 22 nt, Artificial Sequence
  Synthetic
cucggcuaacgcggcggccgcu

SEQ ID NO: 14906 - RNA, 23 nt, Artificial Sequence
  Synthetic
gcucggcuaacgcggcggccgcu

SEQ ID NO: 14907 - RNA, 24 nt, Artificial Sequence
  Synthetic
cgcucggcuaacgcggcggccgcu

SEQ ID NO: 14908 - RNA, 18 nt, Artificial Sequence
  Synthetic
gucccgcaggaggaugcu

SEQ ID NO: 14909 - RNA, 19 nt, Artificial Sequence
  Synthetic
agucccgcaggaggaugcu

SEQ ID NO: 14910 - RNA, 21 nt, Artificial Sequence
  Synthetic
ccagucccgcaggaggaugcu

SEQ ID NO: 14911 - RNA, 22 nt, Artificial Sequence
  Synthetic
gccagucccgcaggaggaugcu

SEQ ID NO: 14912 - RNA, 23 nt, Artificial Sequence
  Synthetic
agccagucccgcaggaggaugcu

SEQ ID NO: 14913 - RNA, 24 nt, Artificial Sequence
  Synthetic
gagccagucccgcaggaggaugcu

SEQ ID NO: 14914 - RNA, 18 nt, Artificial Sequence
  Synthetic
ggccuccucggggcugcu

SEQ ID NO: 14915 - RNA, 19 nt, Artificial Sequence
  Synthetic
cggccuccucggggcugcu

SEQ ID NO: 14916 - RNA, 21 nt, Artificial Sequence
  Synthetic
cacggccuccucggggcugcu

SEQ ID NO: 14917 - RNA, 22 nt, Artificial Sequence
  Synthetic
gcacggccuccucggggcugcu

SEQ ID NO: 14918 - RNA, 23 nt, Artificial Sequence
  Synthetic
agcacggccuccucggggcugcu

SEQ ID NO: 14919 - RNA, 24 nt, Artificial Sequence
  Synthetic
gagcacggccuccucggggcugcu

SEQ ID NO: 14920 - RNA, 18 nt, Artificial Sequence
  Synthetic
ccuccucggggcugcucu

SEQ ID NO: 14921 - RNA, 19 nt, Artificial Sequence
  Synthetic
gccuccucggggcugcucu

SEQ ID NO: 14922 - RNA, 21 nt, Artificial Sequence
  Synthetic
cggccuccucggggcugcucu

SEQ ID NO: 14923 - RNA, 22 nt, Artificial Sequence
  Synthetic
acggccuccucggggcugcucu

SEQ ID NO: 14924 - RNA, 23 nt, Artificial Sequence
  Synthetic
cacggccuccucggggcugcucu

SEQ ID NO: 14925 - RNA, 24 nt, Artificial Sequence
  Synthetic
gcacggccuccucggggcugcucu

SEQ ID NO: 14926 - RNA, 18 nt, Artificial Sequence
  Synthetic
augcgccgaugggcgucu

SEQ ID NO: 14927 - RNA, 19 nt, Artificial Sequence
  Synthetic
gaugcgccgaugggcgucu

SEQ ID NO: 14928 - RNA, 21 nt, Artificial Sequence
  Synthetic
gugaugcgccgaugggcgucu

SEQ ID NO: 14929 - RNA, 22 nt, Artificial Sequence
  Synthetic
ggugaugcgccgaugggcgucu

SEQ ID NO: 14930 - RNA, 23 nt, Artificial Sequence
  Synthetic
cggugaugcgccgaugggcgucu

SEQ ID NO: 14931 - RNA, 24 nt, Artificial Sequence
  Synthetic
ucggugaugcgccgaugggcgucu

SEQ ID NO: 14932 - RNA, 18 nt, Artificial Sequence
  Synthetic
ucugggccacgaucacgu

SEQ ID NO: 14933 - RNA, 19 nt, Artificial Sequence
  Synthetic
gucugggccacgaucacgu

SEQ ID NO: 14934 - RNA, 21 nt, Artificial Sequence
  Synthetic
gggucugggccacgaucacgu

SEQ ID NO: 14935 - RNA, 22 nt, Artificial Sequence
  Synthetic
cgggucugggccacgaucacgu

SEQ ID NO: 14936 - RNA, 23 nt, Artificial Sequence
  Synthetic
gcgggucugggccacgaucacgu

SEQ ID NO: 14937 - RNA, 24 nt, Artificial Sequence
  Synthetic
cgcgggucugggccacgaucacgu

SEQ ID NO: 14938 - RNA, 18 nt, Artificial Sequence
  Synthetic
gccgcgcggccacgucgu

SEQ ID NO: 14939 - RNA, 19 nt, Artificial Sequence
  Synthetic
agccgcgcggccacgucgu

SEQ ID NO: 14940 - RNA, 21 nt, Artificial Sequence
  Synthetic
ggagccgcgcggccacgucgu

SEQ ID NO: 14941 - RNA, 22 nt, Artificial Sequence
  Synthetic
cggagccgcgcggccacgucgu

SEQ ID NO: 14942 - RNA, 23 nt, Artificial Sequence
  Synthetic
ccggagccgcgcggccacgucgu

SEQ ID NO: 14943 - RNA, 24 nt, Artificial Sequence
  Synthetic
uccggagccgcgcggccacgucgu

SEQ ID NO: 14944 - RNA, 18 nt, Artificial Sequence
  Synthetic
acgccgcccccaacaggu

SEQ ID NO: 14945 - RNA, 19 nt, Artificial Sequence
  Synthetic
cacgccgcccccaacaggu

SEQ ID NO: 14946 - RNA, 21 nt, Artificial Sequence
  Synthetic
cgcacgccgcccccaacaggu

SEQ ID NO: 14947 - RNA, 22 nt, Artificial Sequence
  Synthetic
acgcacgccgcccccaacaggu

SEQ ID NO: 14948 - RNA, 23 nt, Artificial Sequence
  Synthetic
cacgcacgccgcccccaacaggu

SEQ ID NO: 14949 - RNA, 24 nt, Artificial Sequence
  Synthetic
ucacgcacgccgcccccaacaggu

SEQ ID NO: 14950 - RNA, 18 nt, Artificial Sequence
  Synthetic
guguuguuccggcccggu

SEQ ID NO: 14951 - RNA, 19 nt, Artificial Sequence
  Synthetic
cguguuguuccggcccggu

SEQ ID NO: 14952 - RNA, 21 nt, Artificial Sequence
  Synthetic
agcguguuguuccggcccggu

SEQ ID NO: 14953 - RNA, 22 nt, Artificial Sequence
  Synthetic
uagcguguuguuccggcccggu

SEQ ID NO: 14954 - RNA, 23 nt, Artificial Sequence
  Synthetic
cuagcguguuguuccggcccggu

SEQ ID NO: 14955 - RNA, 24 nt, Artificial Sequence
  Synthetic
gcuagcguguuguuccggcccggu

SEQ ID NO: 14956 - RNA, 18 nt, Artificial Sequence
  Synthetic
ucugcucaguucggcggu

SEQ ID NO: 14957 - RNA, 19 nt, Artificial Sequence
  Synthetic
gucugcucaguucggcggu

SEQ ID NO: 14958 - RNA, 21 nt, Artificial Sequence
  Synthetic
gugucugcucaguucggcggu

SEQ ID NO: 14959 - RNA, 22 nt, Artificial Sequence
  Synthetic
ggugucugcucaguucggcggu

SEQ ID NO: 14960 - RNA, 23 nt, Artificial Sequence
  Synthetic
gggugucugcucaguucggcggu

SEQ ID NO: 14961 - RNA, 24 nt, Artificial Sequence
  Synthetic
cgggugucugcucaguucggcggu

SEQ ID NO: 14962 - RNA, 18 nt, Artificial Sequence
  Synthetic
cgccccgaacccugcggu

SEQ ID NO: 14963 - RNA, 19 nt, Artificial Sequence
  Synthetic
ccgccccgaacccugcggu

SEQ ID NO: 14964 - RNA, 21 nt, Artificial Sequence
  Synthetic
caccgccccgaacccugcggu

SEQ ID NO: 14965 - RNA, 22 nt, Artificial Sequence
  Synthetic
ccaccgccccgaacccugcggu

SEQ ID NO: 14966 - RNA, 23 nt, Artificial Sequence
  Synthetic
cccaccgccccgaacccugcggu

SEQ ID NO: 14967 - RNA, 24 nt, Artificial Sequence
  Synthetic
acccaccgccccgaacccugcggu

SEQ ID NO: 14968 - RNA, 18 nt, Artificial Sequence
  Synthetic
cuccucuaccucgcgggu

SEQ ID NO: 14969 - RNA, 19 nt, Artificial Sequence
  Synthetic
ucuccucuaccucgcgggu

SEQ ID NO: 14970 - RNA, 21 nt, Artificial Sequence
  Synthetic
cgucuccucuaccucgcgggu

SEQ ID NO: 14971 - RNA, 22 nt, Artificial Sequence
  Synthetic
ccgucuccucuaccucgcgggu

SEQ ID NO: 14972 - RNA, 23 nt, Artificial Sequence
  Synthetic
accgucuccucuaccucgcgggu

SEQ ID NO: 14973 - RNA, 24 nt, Artificial Sequence
  Synthetic
gaccgucuccucuaccucgcgggu

SEQ ID NO: 14974 - RNA, 18 nt, Artificial Sequence
  Synthetic
aaaucggccaggagcugu

SEQ ID NO: 14975 - RNA, 19 nt, Artificial Sequence
  Synthetic
gaaaucggccaggagcugu

SEQ ID NO: 14976 - RNA, 21 nt, Artificial Sequence
  Synthetic
gggaaaucggccaggagcugu

SEQ ID NO: 14977 - RNA, 22 nt, Artificial Sequence
  Synthetic
cgggaaaucggccaggagcugu

SEQ ID NO: 14978 - RNA, 23 nt, Artificial Sequence
  Synthetic
ccgggaaaucggccaggagcugu

SEQ ID NO: 14979 - RNA, 24 nt, Artificial Sequence
  Synthetic
uccgggaaaucggccaggagcugu

SEQ ID NO: 14980 - RNA, 18 nt, Artificial Sequence
  Synthetic
gcucguucaggugggauu

SEQ ID NO: 14981 - RNA, 19 nt, Artificial Sequence
  Synthetic
agcucguucaggugggauu

SEQ ID NO: 14982 - RNA, 21 nt, Artificial Sequence
  Synthetic
ccagcucguucaggugggauu

SEQ ID NO: 14983 - RNA, 22 nt, Artificial Sequence
  Synthetic
gccagcucguucaggugggauu

SEQ ID NO: 14984 - RNA, 23 nt, Artificial Sequence
  Synthetic
cgccagcucguucaggugggauu

SEQ ID NO: 14985 - RNA, 24 nt, Artificial Sequence
  Synthetic
ccgccagcucguucaggugggauu

SEQ ID NO: 14986 - RNA, 18 nt, Artificial Sequence
  Synthetic
ccggggggugccacacuu

SEQ ID NO: 14987 - RNA, 19 nt, Artificial Sequence
  Synthetic
uccggggggugccacacuu

SEQ ID NO: 14988 - RNA, 21 nt, Artificial Sequence
  Synthetic
cguccggggggugccacacuu

SEQ ID NO: 14989 - RNA, 22 nt, Artificial Sequence
  Synthetic
ucguccggggggugccacacuu

SEQ ID NO: 14990 - RNA, 23 nt, Artificial Sequence
  Synthetic
gucguccggggggugccacacuu

SEQ ID NO: 14991 - RNA, 24 nt, Artificial Sequence
  Synthetic
cgucguccggggggugccacacuu

SEQ ID NO: 14992 - RNA, 18 nt, Artificial Sequence
  Synthetic
cggccacccgguggccuu

SEQ ID NO: 14993 - RNA, 19 nt, Artificial Sequence
  Synthetic
acggccacccgguggccuu

SEQ ID NO: 14994 - RNA, 21 nt, Artificial Sequence
  Synthetic
gaacggccacccgguggccuu

SEQ ID NO: 14995 - RNA, 22 nt, Artificial Sequence
  Synthetic
ugaacggccacccgguggccuu

SEQ ID NO: 14996 - RNA, 23 nt, Artificial Sequence
  Synthetic
gugaacggccacccgguggccuu

SEQ ID NO: 14997 - RNA, 24 nt, Artificial Sequence
  Synthetic
cgugaacggccacccgguggccuu

SEQ ID NO: 14998 - RNA, 18 nt, Artificial Sequence
  Synthetic
guccuucuucuuguccuu

SEQ ID NO: 14999 - RNA, 19 nt, Artificial Sequence
  Synthetic
gguccuucuucuuguccuu

SEQ ID NO: 15000 - RNA, 21 nt, Artificial Sequence
  Synthetic
cagguccuucuucuuguccuu

SEQ ID NO: 15001 - RNA, 22 nt, Artificial Sequence
  Synthetic
ucagguccuucuucuuguccuu

SEQ ID NO: 15002 - RNA, 23 nt, Artificial Sequence
  Synthetic
cucagguccuucuucuuguccuu

SEQ ID NO: 15003 - RNA, 24 nt, Artificial Sequence
  Synthetic
gcucagguccuucuucuuguccuu

SEQ ID NO: 15004 - RNA, 18 nt, Artificial Sequence
  Synthetic
cucggacaccagcagcuu

SEQ ID NO: 15005 - RNA, 19 nt, Artificial Sequence
  Synthetic
gcucggacaccagcagcuu

SEQ ID NO: 15006 - RNA, 21 nt, Artificial Sequence
  Synthetic
cagcucggacaccagcagcuu

SEQ ID NO: 15007 - RNA, 22 nt, Artificial Sequence
  Synthetic
ccagcucggacaccagcagcuu

SEQ ID NO: 15008 - RNA, 23 nt, Artificial Sequence
  Synthetic
gccagcucggacaccagcagcuu

SEQ ID NO: 15009 - RNA, 24 nt, Artificial Sequence
  Synthetic
ggccagcucggacaccagcagcuu

SEQ ID NO: 15010 - RNA, 18 nt, Artificial Sequence
  Synthetic
cuuuaucuugcugcgcuu

SEQ ID NO: 15011 - RNA, 19 nt, Artificial Sequence
  Synthetic
ccuuuaucuugcugcgcuu

SEQ ID NO: 15012 - RNA, 21 nt, Artificial Sequence
  Synthetic
caccuuuaucuugcugcgcuu

SEQ ID NO: 15013 - RNA, 22 nt, Artificial Sequence
  Synthetic
ucaccuuuaucuugcugcgcuu

SEQ ID NO: 15014 - RNA, 23 nt, Artificial Sequence
  Synthetic
uucaccuuuaucuugcugcgcuu

SEQ ID NO: 15015 - RNA, 24 nt, Artificial Sequence
  Synthetic
guucaccuuuaucuugcugcgcuu

SEQ ID NO: 15016 - RNA, 18 nt, Artificial Sequence
  Synthetic
cgugcugaagcacagguu

SEQ ID NO: 15017 - RNA, 19 nt, Artificial Sequence
  Synthetic
gcgugcugaagcacagguu

SEQ ID NO: 15018 - RNA, 21 nt, Artificial Sequence
  Synthetic
gagcgugcugaagcacagguu

SEQ ID NO: 15019 - RNA, 22 nt, Artificial Sequence
  Synthetic
agagcgugcugaagcacagguu

SEQ ID NO: 15020 - RNA, 23 nt, Artificial Sequence
  Synthetic
gagagcgugcugaagcacagguu

SEQ ID NO: 15021 - RNA, 24 nt, Artificial Sequence
  Synthetic
ggagagcgugcugaagcacagguu

SEQ ID NO: 15022 - RNA, 18 nt, Artificial Sequence
  Synthetic
gaaguaauaguccguguu

SEQ ID NO: 15023 - RNA, 19 nt, Artificial Sequence
  Synthetic
agaaguaauaguccguguu

SEQ ID NO: 15024 - RNA, 21 nt, Artificial Sequence
  Synthetic
ggagaaguaauaguccguguu

SEQ ID NO: 15025 - RNA, 22 nt, Artificial Sequence
  Synthetic
gggagaaguaauaguccguguu

SEQ ID NO: 15026 - RNA, 23 nt, Artificial Sequence
  Synthetic
ugggagaaguaauaguccguguu

SEQ ID NO: 15027 - RNA, 24 nt, Artificial Sequence
  Synthetic
gugggagaaguaauaguccguguu

SEQ ID NO: 15028 - RNA, 18 nt, Artificial Sequence
  Synthetic
ggcugguaccgucucaaa

SEQ ID NO: 15029 - RNA, 19 nt, Artificial Sequence
  Synthetic
cggcugguaccgucucaaa

SEQ ID NO: 15030 - RNA, 21 nt, Artificial Sequence
  Synthetic
uucggcugguaccgucucaaa

SEQ ID NO: 15031 - RNA, 22 nt, Artificial Sequence
  Synthetic
cuucggcugguaccgucucaaa

SEQ ID NO: 15032 - RNA, 23 nt, Artificial Sequence
  Synthetic
ccuucggcugguaccgucucaaa

SEQ ID NO: 15033 - RNA, 24 nt, Artificial Sequence
  Synthetic
accuucggcugguaccgucucaaa

SEQ ID NO: 15034 - RNA, 18 nt, Artificial Sequence
  Synthetic
uuuguccucaccgccgaa

SEQ ID NO: 15035 - RNA, 19 nt, Artificial Sequence
  Synthetic
cuuuguccucaccgccgaa

SEQ ID NO: 15036 - RNA, 21 nt, Artificial Sequence
  Synthetic
gacuuuguccucaccgccgaa

SEQ ID NO: 15037 - RNA, 22 nt, Artificial Sequence
  Synthetic
ggacuuuguccucaccgccgaa

SEQ ID NO: 15038 - RNA, 23 nt, Artificial Sequence
  Synthetic
aggacuuuguccucaccgccgaa

SEQ ID NO: 15039 - RNA, 24 nt, Artificial Sequence
  Synthetic
caggacuuuguccucaccgccgaa

SEQ ID NO: 15040 - RNA, 18 nt, Artificial Sequence
  Synthetic
accgcgucuacguccgaa

SEQ ID NO: 15041 - RNA, 19 nt, Artificial Sequence
  Synthetic
uaccgcgucuacguccgaa

SEQ ID NO: 15042 - RNA, 21 nt, Artificial Sequence
  Synthetic
uuuaccgcgucuacguccgaa

SEQ ID NO: 15043 - RNA, 22 nt, Artificial Sequence
  Synthetic
uuuuaccgcgucuacguccgaa

SEQ ID NO: 15044 - RNA, 23 nt, Artificial Sequence
  Synthetic
guuuuaccgcgucuacguccgaa

SEQ ID NO: 15045 - RNA, 24 nt, Artificial Sequence
  Synthetic
uguuuuaccgcgucuacguccgaa

SEQ ID NO: 15046 - RNA, 18 nt, Artificial Sequence
  Synthetic
aguacuuuuacaugaaca

SEQ ID NO: 15047 - RNA, 19 nt, Artificial Sequence
  Synthetic
caguacuuuuacaugaaca

SEQ ID NO: 15048 - RNA, 21 nt, Artificial Sequence
  Synthetic
ggcaguacuuuuacaugaaca

SEQ ID NO: 15049 - RNA, 22 nt, Artificial Sequence
  Synthetic
cggcaguacuuuuacaugaaca

SEQ ID NO: 15050 - RNA, 23 nt, Artificial Sequence
  Synthetic
gcggcaguacuuuuacaugaaca

SEQ ID NO: 15051 - RNA, 24 nt, Artificial Sequence
  Synthetic
cgcggcaguacuuuuacaugaaca

SEQ ID NO: 15052 - RNA, 18 nt, Artificial Sequence
  Synthetic
caggcacgugggguacca

SEQ ID NO: 15053 - RNA, 19 nt, Artificial Sequence
  Synthetic
gcaggcacgugggguacca

SEQ ID NO: 15054 - RNA, 21 nt, Artificial Sequence
  Synthetic
cggcaggcacgugggguacca

SEQ ID NO: 15055 - RNA, 22 nt, Artificial Sequence
  Synthetic
ccggcaggcacgugggguacca

SEQ ID NO: 15056 - RNA, 23 nt, Artificial Sequence
  Synthetic
gccggcaggcacgugggguacca

SEQ ID NO: 15057 - RNA, 24 nt, Artificial Sequence
  Synthetic
cgccggcaggcacgugggguacca

SEQ ID NO: 15058 - RNA, 18 nt, Artificial Sequence
  Synthetic
cuagacgccgccgcccca

SEQ ID NO: 15059 - RNA, 19 nt, Artificial Sequence
  Synthetic
gcuagacgccgccgcccca

SEQ ID NO: 15060 - RNA, 21 nt, Artificial Sequence
  Synthetic
gagcuagacgccgccgcccca

SEQ ID NO: 15061 - RNA, 22 nt, Artificial Sequence
  Synthetic
cgagcuagacgccgccgcccca

SEQ ID NO: 15062 - RNA, 23 nt, Artificial Sequence
  Synthetic
gcgagcuagacgccgccgcccca

SEQ ID NO: 15063 - RNA, 24 nt, Artificial Sequence
  Synthetic
cgcgagcuagacgccgccgcccca

SEQ ID NO: 15064 - RNA, 18 nt, Artificial Sequence
  Synthetic
gaggacgaggagcggcca

SEQ ID NO: 15065 - RNA, 19 nt, Artificial Sequence
  Synthetic
ggaggacgaggagcggcca

SEQ ID NO: 15066 - RNA, 21 nt, Artificial Sequence
  Synthetic
cgggaggacgaggagcggcca

SEQ ID NO: 15067 - RNA, 22 nt, Artificial Sequence
  Synthetic
ccgggaggacgaggagcggcca

SEQ ID NO: 15068 - RNA, 23 nt, Artificial Sequence
  Synthetic
cccgggaggacgaggagcggcca

SEQ ID NO: 15069 - RNA, 24 nt, Artificial Sequence
  Synthetic
gcccgggaggacgaggagcggcca

SEQ ID NO: 15070 - RNA, 18 nt, Artificial Sequence
  Synthetic
cggcggacaaccuggcca

SEQ ID NO: 15071 - RNA, 19 nt, Artificial Sequence
  Synthetic
acggcggacaaccuggcca

SEQ ID NO: 15072 - RNA, 21 nt, Artificial Sequence
  Synthetic
guacggcggacaaccuggcca

SEQ ID NO: 15073 - RNA, 22 nt, Artificial Sequence
  Synthetic
uguacggcggacaaccuggcca

SEQ ID NO: 15074 - RNA, 23 nt, Artificial Sequence
  Synthetic
cuguacggcggacaaccuggcca

SEQ ID NO: 15075 - RNA, 24 nt, Artificial Sequence
  Synthetic
acuguacggcggacaaccuggcca

SEQ ID NO: 15076 - RNA, 18 nt, Artificial Sequence
  Synthetic
aacucgucgaauguugca

SEQ ID NO: 15077 - RNA, 19 nt, Artificial Sequence
  Synthetic
aaacucgucgaauguugca

SEQ ID NO: 15078 - RNA, 21 nt, Artificial Sequence
  Synthetic
ggaaacucgucgaauguugca

SEQ ID NO: 15079 - RNA, 22 nt, Artificial Sequence
  Synthetic
aggaaacucgucgaauguugca

SEQ ID NO: 15080 - RNA, 23 nt, Artificial Sequence
  Synthetic
gaggaaacucgucgaauguugca

SEQ ID NO: 15081 - RNA, 24 nt, Artificial Sequence
  Synthetic
ggaggaaacucgucgaauguugca

SEQ ID NO: 15082 - RNA, 18 nt, Artificial Sequence
  Synthetic
ggaauaacgccaagauca

SEQ ID NO: 15083 - RNA, 19 nt, Artificial Sequence
  Synthetic
gggaauaacgccaagauca

SEQ ID NO: 15084 - RNA, 21 nt, Artificial Sequence
  Synthetic
uugggaauaacgccaagauca

SEQ ID NO: 15085 - RNA, 22 nt, Artificial Sequence
  Synthetic
uuugggaauaacgccaagauca

SEQ ID NO: 15086 - RNA, 23 nt, Artificial Sequence
  Synthetic
guuugggaauaacgccaagauca

SEQ ID NO: 15087 - RNA, 24 nt, Artificial Sequence
  Synthetic
uguuugggaauaacgccaagauca

SEQ ID NO: 15088 - RNA, 18 nt, Artificial Sequence
  Synthetic
acucgguguacggguuca

SEQ ID NO: 15089 - RNA, 19 nt, Artificial Sequence
  Synthetic
aacucgguguacggguuca

SEQ ID NO: 15090 - RNA, 21 nt, Artificial Sequence
  Synthetic
guaacucgguguacggguuca

SEQ ID NO: 15091 - RNA, 22 nt, Artificial Sequence
  Synthetic
uguaacucgguguacggguuca

SEQ ID NO: 15092 - RNA, 23 nt, Artificial Sequence
  Synthetic
guguaacucgguguacggguuca

SEQ ID NO: 15093 - RNA, 24 nt, Artificial Sequence
  Synthetic
uguguaacucgguguacggguuca

SEQ ID NO: 15094 - RNA, 18 nt, Artificial Sequence
  Synthetic
gcaaggacuaccuggaga

SEQ ID NO: 15095 - RNA, 19 nt, Artificial Sequence
  Synthetic
ggcaaggacuaccuggaga

SEQ ID NO: 15096 - RNA, 21 nt, Artificial Sequence
  Synthetic
cgggcaaggacuaccuggaga

SEQ ID NO: 15097 - RNA, 22 nt, Artificial Sequence
  Synthetic
gcgggcaaggacuaccuggaga

SEQ ID NO: 15098 - RNA, 23 nt, Artificial Sequence
  Synthetic
ggcgggcaaggacuaccuggaga

SEQ ID NO: 15099 - RNA, 24 nt, Artificial Sequence
  Synthetic
aggcgggcaaggacuaccuggaga

SEQ ID NO: 15100 - RNA, 18 nt, Artificial Sequence
  Synthetic
uggacgccaucacaccga

SEQ ID NO: 15101 - RNA, 19 nt, Artificial Sequence
  Synthetic
auggacgccaucacaccga

SEQ ID NO: 15102 - RNA, 21 nt, Artificial Sequence
  Synthetic
uuauggacgccaucacaccga

SEQ ID NO: 15103 - RNA, 22 nt, Artificial Sequence
  Synthetic
uuuauggacgccaucacaccga

SEQ ID NO: 15104 - RNA, 23 nt, Artificial Sequence
  Synthetic
guuuauggacgccaucacaccga

SEQ ID NO: 15105 - RNA, 24 nt, Artificial Sequence
  Synthetic
gguuuauggacgccaucacaccga

SEQ ID NO: 15106 - RNA, 18 nt, Artificial Sequence
  Synthetic
cgaggagggcgggggcga

SEQ ID NO: 15107 - RNA, 19 nt, Artificial Sequence
  Synthetic
gcgaggagggcgggggcga

SEQ ID NO: 15108 - RNA, 21 nt, Artificial Sequence
  Synthetic
acgcgaggagggcgggggcga

SEQ ID NO: 15109 - RNA, 22 nt, Artificial Sequence
  Synthetic
aacgcgaggagggcgggggcga

SEQ ID NO: 15110 - RNA, 23 nt, Artificial Sequence
  Synthetic
gaacgcgaggagggcgggggcga

SEQ ID NO: 15111 - RNA, 24 nt, Artificial Sequence
  Synthetic
cgaacgcgaggagggcgggggcga

SEQ ID NO: 15112 - RNA, 18 nt, Artificial Sequence
  Synthetic
gucaaggcucacgugcga

SEQ ID NO: 15113 - RNA, 19 nt, Artificial Sequence
  Synthetic
cgucaaggcucacgugcga

SEQ ID NO: 15114 - RNA, 21 nt, Artificial Sequence
  Synthetic
uucgucaaggcucacgugcga

SEQ ID NO: 15115 - RNA, 22 nt, Artificial Sequence
  Synthetic
cuucgucaaggcucacgugcga

SEQ ID NO: 15116 - RNA, 23 nt, Artificial Sequence
  Synthetic
ucuucgucaaggcucacgugcga

SEQ ID NO: 15117 - RNA, 24 nt, Artificial Sequence
  Synthetic
uucuucgucaaggcucacgugcga

SEQ ID NO: 15118 - RNA, 18 nt, Artificial Sequence
  Synthetic
ggacaaccuggccaucga

SEQ ID NO: 15119 - RNA, 19 nt, Artificial Sequence
  Synthetic
cggacaaccuggccaucga

SEQ ID NO: 15120 - RNA, 21 nt, Artificial Sequence
  Synthetic
ggcggacaaccuggccaucga

SEQ ID NO: 15121 - RNA, 22 nt, Artificial Sequence
  Synthetic
cggcggacaaccuggccaucga

SEQ ID NO: 15122 - RNA, 23 nt, Artificial Sequence
  Synthetic
acggcggacaaccuggccaucga

SEQ ID NO: 15123 - RNA, 24 nt, Artificial Sequence
  Synthetic
uacggcggacaaccuggccaucga

SEQ ID NO: 15124 - RNA, 18 nt, Artificial Sequence
  Synthetic
ggagcggccagaggagga

SEQ ID NO: 15125 - RNA, 19 nt, Artificial Sequence
  Synthetic
aggagcggccagaggagga

SEQ ID NO: 15126 - RNA, 21 nt, Artificial Sequence
  Synthetic
cgaggagcggccagaggagga

SEQ ID NO: 15127 - RNA, 22 nt, Artificial Sequence
  Synthetic
acgaggagcggccagaggagga

SEQ ID NO: 15128 - RNA, 23 nt, Artificial Sequence
  Synthetic
gacgaggagcggccagaggagga

SEQ ID NO: 15129 - RNA, 24 nt, Artificial Sequence
  Synthetic
ggacgaggagcggccagaggagga

SEQ ID NO: 15130 - RNA, 18 nt, Artificial Sequence
  Synthetic
gcgcaucaccgacccgga

SEQ ID NO: 15131 - RNA, 19 nt, Artificial Sequence
  Synthetic
ggcgcaucaccgacccgga

SEQ ID NO: 15132 - RNA, 21 nt, Artificial Sequence
  Synthetic
ucggcgcaucaccgacccgga

SEQ ID NO: 15133 - RNA, 22 nt, Artificial Sequence
  Synthetic
aucggcgcaucaccgacccgga

SEQ ID NO: 15134 - RNA, 23 nt, Artificial Sequence
  Synthetic
caucggcgcaucaccgacccgga

SEQ ID NO: 15135 - RNA, 24 nt, Artificial Sequence
  Synthetic
ccaucggcgcaucaccgacccgga

SEQ ID NO: 15136 - RNA, 18 nt, Artificial Sequence
  Synthetic
uccccgaaucccaccuga

SEQ ID NO: 15137 - RNA, 19 nt, Artificial Sequence
  Synthetic
cuccccgaaucccaccuga

SEQ ID NO: 15138 - RNA, 21 nt, Artificial Sequence
  Synthetic
accuccccgaaucccaccuga

SEQ ID NO: 15139 - RNA, 22 nt, Artificial Sequence
  Synthetic
gaccuccccgaaucccaccuga

SEQ ID NO: 15140 - RNA, 23 nt, Artificial Sequence
  Synthetic
cgaccuccccgaaucccaccuga

SEQ ID NO: 15141 - RNA, 24 nt, Artificial Sequence
  Synthetic
gcgaccuccccgaaucccaccuga

SEQ ID NO: 15142 - RNA, 18 nt, Artificial Sequence
  Synthetic
uuccaugcgcaucaucua

SEQ ID NO: 15143 - RNA, 19 nt, Artificial Sequence
  Synthetic
auuccaugcgcaucaucua

SEQ ID NO: 15144 - RNA, 21 nt, Artificial Sequence
  Synthetic
cuauuccaugcgcaucaucua

SEQ ID NO: 15145 - RNA, 22 nt, Artificial Sequence
  Synthetic
ccuauuccaugcgcaucaucua

SEQ ID NO: 15146 - RNA, 23 nt, Artificial Sequence
  Synthetic
cccuauuccaugcgcaucaucua

SEQ ID NO: 15147 - RNA, 24 nt, Artificial Sequence
  Synthetic
gcccuauuccaugcgcaucaucua

SEQ ID NO: 15148 - RNA, 18 nt, Artificial Sequence
  Synthetic
guacaucggcgucaucua

SEQ ID NO: 15149 - RNA, 19 nt, Artificial Sequence
  Synthetic
aguacaucggcgucaucua

SEQ ID NO: 15150 - RNA, 21 nt, Artificial Sequence
  Synthetic
aaaguacaucggcgucaucua

SEQ ID NO: 15151 - RNA, 22 nt, Artificial Sequence
  Synthetic
aaaaguacaucggcgucaucua

SEQ ID NO: 15152 - RNA, 23 nt, Artificial Sequence
  Synthetic
aaaaaguacaucggcgucaucua

SEQ ID NO: 15153 - RNA, 24 nt, Artificial Sequence
  Synthetic
gaaaaaguacaucggcgucaucua

SEQ ID NO: 15154 - RNA, 18 nt, Artificial Sequence
  Synthetic
gcccagacccgcgaggua

SEQ ID NO: 15155 - RNA, 19 nt, Artificial Sequence
  Synthetic
ggcccagacccgcgaggua

SEQ ID NO: 15156 - RNA, 21 nt, Artificial Sequence
  Synthetic
guggcccagacccgcgaggua

SEQ ID NO: 15157 - RNA, 22 nt, Artificial Sequence
  Synthetic
cguggcccagacccgcgaggua

SEQ ID NO: 15158 - RNA, 23 nt, Artificial Sequence
  Synthetic
ucguggcccagacccgcgaggua

SEQ ID NO: 15159 - RNA, 24 nt, Artificial Sequence
  Synthetic
aucguggcccagacccgcgaggua

SEQ ID NO: 15160 - RNA, 18 nt, Artificial Sequence
  Synthetic
ccgccgggcccgcgcaac

SEQ ID NO: 15161 - RNA, 19 nt, Artificial Sequence
  Synthetic
gccgccgggcccgcgcaac

SEQ ID NO: 15162 - RNA, 21 nt, Artificial Sequence
  Synthetic
acgccgccgggcccgcgcaac

SEQ ID NO: 15163 - RNA, 22 nt, Artificial Sequence
  Synthetic
uacgccgccgggcccgcgcaac

SEQ ID NO: 15164 - RNA, 23 nt, Artificial Sequence
  Synthetic
cuacgccgccgggcccgcgcaac

SEQ ID NO: 15165 - RNA, 24 nt, Artificial Sequence
  Synthetic
acuacgccgccgggcccgcgcaac

SEQ ID NO: 15166 - RNA, 18 nt, Artificial Sequence
  Synthetic
gggaggacgaggacgaac

SEQ ID NO: 15167 - RNA, 19 nt, Artificial Sequence
  Synthetic
ggggaggacgaggacgaac

SEQ ID NO: 15168 - RNA, 21 nt, Artificial Sequence
  Synthetic
agggggaggacgaggacgaac

SEQ ID NO: 15169 - RNA, 22 nt, Artificial Sequence
  Synthetic
gagggggaggacgaggacgaac

SEQ ID NO: 15170 - RNA, 23 nt, Artificial Sequence
  Synthetic
ggagggggaggacgaggacgaac

SEQ ID NO: 15171 - RNA, 24 nt, Artificial Sequence
  Synthetic
aggagggggaggacgaggacgaac

SEQ ID NO: 15172 - RNA, 18 nt, Artificial Sequence
  Synthetic
caguacuuuuacaugaac

SEQ ID NO: 15173 - RNA, 19 nt, Artificial Sequence
  Synthetic
gcaguacuuuuacaugaac

SEQ ID NO: 15174 - RNA, 21 nt, Artificial Sequence
  Synthetic
cggcaguacuuuuacaugaac

SEQ ID NO: 15175 - RNA, 22 nt, Artificial Sequence
  Synthetic
gcggcaguacuuuuacaugaac

SEQ ID NO: 15176 - RNA, 23 nt, Artificial Sequence
  Synthetic
cgcggcaguacuuuuacaugaac

SEQ ID NO: 15177 - RNA, 24 nt, Artificial Sequence
  Synthetic
acgcggcaguacuuuuacaugaac

SEQ ID NO: 15178 - RNA, 18 nt, Artificial Sequence
  Synthetic
cacggcgucgcccugaac

SEQ ID NO: 15179 - RNA, 19 nt, Artificial Sequence
  Synthetic
ccacggcgucgcccugaac

SEQ ID NO: 15180 - RNA, 21 nt, Artificial Sequence
  Synthetic
gcccacggcgucgcccugaac

SEQ ID NO: 15181 - RNA, 22 nt, Artificial Sequence
  Synthetic
ugcccacggcgucgcccugaac

SEQ ID NO: 15182 - RNA, 23 nt, Artificial Sequence
  Synthetic
uugcccacggcgucgcccugaac

SEQ ID NO: 15183 - RNA, 24 nt, Artificial Sequence
  Synthetic
auugcccacggcgucgcccugaac

SEQ ID NO: 15184 - RNA, 18 nt, Artificial Sequence
  Synthetic
gaccuccccgaaucccac

SEQ ID NO: 15185 - RNA, 19 nt, Artificial Sequence
  Synthetic
cgaccuccccgaaucccac

SEQ ID NO: 15186 - RNA, 21 nt, Artificial Sequence
  Synthetic
ugcgaccuccccgaaucccac

SEQ ID NO: 15187 - RNA, 22 nt, Artificial Sequence
  Synthetic
cugcgaccuccccgaaucccac

SEQ ID NO: 15188 - RNA, 23 nt, Artificial Sequence
  Synthetic
ccugcgaccuccccgaaucccac

SEQ ID NO: 15189 - RNA, 24 nt, Artificial Sequence
  Synthetic
uccugcgaccuccccgaaucccac

SEQ ID NO: 15190 - RNA, 18 nt, Artificial Sequence
  Synthetic
gccgacgcaguggcgcac

SEQ ID NO: 15191 - RNA, 19 nt, Artificial Sequence
  Synthetic
ggccgacgcaguggcgcac

SEQ ID NO: 15192 - RNA, 21 nt, Artificial Sequence
  Synthetic
agggccgacgcaguggcgcac

SEQ ID NO: 15193 - RNA, 22 nt, Artificial Sequence
  Synthetic
gagggccgacgcaguggcgcac

SEQ ID NO: 15194 - RNA, 23 nt, Artificial Sequence
  Synthetic
ugagggccgacgcaguggcgcac

SEQ ID NO: 15195 - RNA, 24 nt, Artificial Sequence
  Synthetic
cugagggccgacgcaguggcgcac

SEQ ID NO: 15196 - RNA, 18 nt, Artificial Sequence
  Synthetic
gagaccgccggcaggcac

SEQ ID NO: 15197 - RNA, 19 nt, Artificial Sequence
  Synthetic
ggagaccgccggcaggcac

SEQ ID NO: 15198 - RNA, 21 nt, Artificial Sequence
  Synthetic
cgggagaccgccggcaggcac

SEQ ID NO: 15199 - RNA, 22 nt, Artificial Sequence
  Synthetic
gcgggagaccgccggcaggcac

SEQ ID NO: 15200 - RNA, 23 nt, Artificial Sequence
  Synthetic
cgcgggagaccgccggcaggcac

SEQ ID NO: 15201 - RNA, 24 nt, Artificial Sequence
  Synthetic
gcgcgggagaccgccggcaggcac

SEQ ID NO: 15202 - RNA, 18 nt, Artificial Sequence
  Synthetic
uuuccgguggccgggcac

SEQ ID NO: 15203 - RNA, 19 nt, Artificial Sequence
  Synthetic
cuuuccgguggccgggcac

SEQ ID NO: 15204 - RNA, 21 nt, Artificial Sequence
  Synthetic
gccuuuccgguggccgggcac

SEQ ID NO: 15205 - RNA, 22 nt, Artificial Sequence
  Synthetic
ggccuuuccgguggccgggcac

SEQ ID NO: 15206 - RNA, 23 nt, Artificial Sequence
  Synthetic
uggccuuuccgguggccgggcac

SEQ ID NO: 15207 - RNA, 24 nt, Artificial Sequence
  Synthetic
cuggccuuuccgguggccgggcac

SEQ ID NO: 15208 - RNA, 18 nt, Artificial Sequence
  Synthetic
cccacuuccggguuucac

SEQ ID NO: 15209 - RNA, 19 nt, Artificial Sequence
  Synthetic
ccccacuuccggguuucac

SEQ ID NO: 15210 - RNA, 21 nt, Artificial Sequence
  Synthetic
gaccccacuuccggguuucac

SEQ ID NO: 15211 - RNA, 22 nt, Artificial Sequence
  Synthetic
ugaccccacuuccggguuucac

SEQ ID NO: 15212 - RNA, 23 nt, Artificial Sequence
  Synthetic
uugaccccacuuccggguuucac

SEQ ID NO: 15213 - RNA, 24 nt, Artificial Sequence
  Synthetic
cuugaccccacuuccggguuucac

SEQ ID NO: 15214 - RNA, 18 nt, Artificial Sequence
  Synthetic
ggacgccaucacaccgac

SEQ ID NO: 15215 - RNA, 19 nt, Artificial Sequence
  Synthetic
uggacgccaucacaccgac

SEQ ID NO: 15216 - RNA, 21 nt, Artificial Sequence
  Synthetic
uauggacgccaucacaccgac

SEQ ID NO: 15217 - RNA, 22 nt, Artificial Sequence
  Synthetic
uuauggacgccaucacaccgac

SEQ ID NO: 15218 - RNA, 23 nt, Artificial Sequence
  Synthetic
uuuauggacgccaucacaccgac

SEQ ID NO: 15219 - RNA, 24 nt, Artificial Sequence
  Synthetic
guuuauggacgccaucacaccgac

SEQ ID NO: 15220 - RNA, 18 nt, Artificial Sequence
  Synthetic
caucggcgcaucaccgac

SEQ ID NO: 15221 - RNA, 19 nt, Artificial Sequence
  Synthetic
ccaucggcgcaucaccgac

SEQ ID NO: 15222 - RNA, 21 nt, Artificial Sequence
  Synthetic
gcccaucggcgcaucaccgac

SEQ ID NO: 15223 - RNA, 22 nt, Artificial Sequence
  Synthetic
cgcccaucggcgcaucaccgac

SEQ ID NO: 15224 - RNA, 23 nt, Artificial Sequence
  Synthetic
acgcccaucggcgcaucaccgac

SEQ ID NO: 15225 - RNA, 24 nt, Artificial Sequence
  Synthetic
gacgcccaucggcgcaucaccgac

SEQ ID NO: 15226 - RNA, 18 nt, Artificial Sequence
  Synthetic
cugcugcgccuggccgac

SEQ ID NO: 15227 - RNA, 19 nt, Artificial Sequence
  Synthetic
ccugcugcgccuggccgac

SEQ ID NO: 15228 - RNA, 21 nt, Artificial Sequence
  Synthetic
ugccugcugcgccuggccgac

SEQ ID NO: 15229 - RNA, 22 nt, Artificial Sequence
  Synthetic
gugccugcugcgccuggccgac

SEQ ID NO: 15230 - RNA, 23 nt, Artificial Sequence
  Synthetic
cgugccugcugcgccuggccgac

SEQ ID NO: 15231 - RNA, 24 nt, Artificial Sequence
  Synthetic
acgugccugcugcgccuggccgac

SEQ ID NO: 15232 - RNA, 18 nt, Artificial Sequence
  Synthetic
aaggacaagaagaaggac

SEQ ID NO: 15233 - RNA, 19 nt, Artificial Sequence
  Synthetic
gaaggacaagaagaaggac

SEQ ID NO: 15234 - RNA, 21 nt, Artificial Sequence
  Synthetic
cugaaggacaagaagaaggac

SEQ ID NO: 15235 - RNA, 22 nt, Artificial Sequence
  Synthetic
ccugaaggacaagaagaaggac

SEQ ID NO: 15236 - RNA, 23 nt, Artificial Sequence
  Synthetic
uccugaaggacaagaagaaggac

SEQ ID NO: 15237 - RNA, 24 nt, Artificial Sequence
  Synthetic
guccugaaggacaagaagaaggac

SEQ ID NO: 15238 - RNA, 18 nt, Artificial Sequence
  Synthetic
gaagccguccugaaggac

SEQ ID NO: 15239 - RNA, 19 nt, Artificial Sequence
  Synthetic
cgaagccguccugaaggac

SEQ ID NO: 15240 - RNA, 21 nt, Artificial Sequence
  Synthetic
gccgaagccguccugaaggac

SEQ ID NO: 15241 - RNA, 22 nt, Artificial Sequence
  Synthetic
ggccgaagccguccugaaggac

SEQ ID NO: 15242 - RNA, 23 nt, Artificial Sequence
  Synthetic
uggccgaagccguccugaaggac

SEQ ID NO: 15243 - RNA, 24 nt, Artificial Sequence
  Synthetic
guggccgaagccguccugaaggac

SEQ ID NO: 15244 - RNA, 18 nt, Artificial Sequence
  Synthetic
gccgcagcccgggaggac

SEQ ID NO: 15245 - RNA, 19 nt, Artificial Sequence
  Synthetic
ggccgcagcccgggaggac

SEQ ID NO: 15246 - RNA, 21 nt, Artificial Sequence
  Synthetic
ccggccgcagcccgggaggac

SEQ ID NO: 15247 - RNA, 22 nt, Artificial Sequence
  Synthetic
uccggccgcagcccgggaggac

SEQ ID NO: 15248 - RNA, 23 nt, Artificial Sequence
  Synthetic
guccggccgcagcccgggaggac

SEQ ID NO: 15249 - RNA, 24 nt, Artificial Sequence
  Synthetic
cguccggccgcagcccgggaggac

SEQ ID NO: 15250 - RNA, 18 nt, Artificial Sequence
  Synthetic
gaggaggagggggaggac

SEQ ID NO: 15251 - RNA, 19 nt, Artificial Sequence
  Synthetic
agaggaggagggggaggac

SEQ ID NO: 15252 - RNA, 21 nt, Artificial Sequence
  Synthetic
ccagaggaggagggggaggac

SEQ ID NO: 15253 - RNA, 22 nt, Artificial Sequence
  Synthetic
gccagaggaggagggggaggac

SEQ ID NO: 15254 - RNA, 23 nt, Artificial Sequence
  Synthetic
ggccagaggaggagggggaggac

SEQ ID NO: 15255 - RNA, 24 nt, Artificial Sequence
  Synthetic
cggccagaggaggagggggaggac

SEQ ID NO: 15256 - RNA, 18 nt, Artificial Sequence
  Synthetic
cgcaucaucuacggggac

SEQ ID NO: 15257 - RNA, 19 nt, Artificial Sequence
  Synthetic
gcgcaucaucuacggggac

SEQ ID NO: 15258 - RNA, 21 nt, Artificial Sequence
  Synthetic
augcgcaucaucuacggggac

SEQ ID NO: 15259 - RNA, 22 nt, Artificial Sequence
  Synthetic
caugcgcaucaucuacggggac

SEQ ID NO: 15260 - RNA, 23 nt, Artificial Sequence
  Synthetic
ccaugcgcaucaucuacggggac

SEQ ID NO: 15261 - RNA, 24 nt, Artificial Sequence
  Synthetic
uccaugcgcaucaucuacggggac

SEQ ID NO: 15262 - RNA, 18 nt, Artificial Sequence
  Synthetic
gaggcgggcaaggacuac

SEQ ID NO: 15263 - RNA, 19 nt, Artificial Sequence
  Synthetic
ggaggcgggcaaggacuac

SEQ ID NO: 15264 - RNA, 21 nt, Artificial Sequence
  Synthetic
cuggaggcgggcaaggacuac

SEQ ID NO: 15265 - RNA, 22 nt, Artificial Sequence
  Synthetic
ccuggaggcgggcaaggacuac

SEQ ID NO: 15266 - RNA, 23 nt, Artificial Sequence
  Synthetic
accuggaggcgggcaaggacuac

SEQ ID NO: 15267 - RNA, 24 nt, Artificial Sequence
  Synthetic
caccuggaggcgggcaaggacuac

SEQ ID NO: 15268 - RNA, 18 nt, Artificial Sequence
  Synthetic
uccaugcgcaucaucuac

SEQ ID NO: 15269 - RNA, 19 nt, Artificial Sequence
  Synthetic
uuccaugcgcaucaucuac

SEQ ID NO: 15270 - RNA, 21 nt, Artificial Sequence
  Synthetic
uauuccaugcgcaucaucuac

SEQ ID NO: 15271 - RNA, 22 nt, Artificial Sequence
  Synthetic
cuauuccaugcgcaucaucuac

SEQ ID NO: 15272 - RNA, 23 nt, Artificial Sequence
  Synthetic
ccuauuccaugcgcaucaucuac

SEQ ID NO: 15273 - RNA, 24 nt, Artificial Sequence
  Synthetic
cccuauuccaugcgcaucaucuac

SEQ ID NO: 15274 - RNA, 18 nt, Artificial Sequence
  Synthetic
ggcaggcacgugggguac

SEQ ID NO: 15275 - RNA, 19 nt, Artificial Sequence
  Synthetic
cggcaggcacgugggguac

SEQ ID NO: 15276 - RNA, 21 nt, Artificial Sequence
  Synthetic
gccggcaggcacgugggguac

SEQ ID NO: 15277 - RNA, 22 nt, Artificial Sequence
  Synthetic
cgccggcaggcacgugggguac

SEQ ID NO: 15278 - RNA, 23 nt, Artificial Sequence
  Synthetic
ccgccggcaggcacgugggguac

SEQ ID NO: 15279 - RNA, 24 nt, Artificial Sequence
  Synthetic
accgccggcaggcacgugggguac

SEQ ID NO: 15280 - RNA, 18 nt, Artificial Sequence
  Synthetic
acgcggcaguacuuuuac

SEQ ID NO: 15281 - RNA, 19 nt, Artificial Sequence
  Synthetic
cacgcggcaguacuuuuac

SEQ ID NO: 15282 - RNA, 21 nt, Artificial Sequence
  Synthetic
ggcacgcggcaguacuuuuac

SEQ ID NO: 15283 - RNA, 22 nt, Artificial Sequence
  Synthetic
cggcacgcggcaguacuuuuac

SEQ ID NO: 15284 - RNA, 23 nt, Artificial Sequence
  Synthetic
acggcacgcggcaguacuuuuac

SEQ ID NO: 15285 - RNA, 24 nt, Artificial Sequence
  Synthetic
uacggcacgcggcaguacuuuuac

SEQ ID NO: 15286 - RNA, 18 nt, Artificial Sequence
  Synthetic
uuuauucugccggacacc

SEQ ID NO: 15287 - RNA, 19 nt, Artificial Sequence
  Synthetic
cuuuauucugccggacacc

SEQ ID NO: 15288 - RNA, 21 nt, Artificial Sequence
  Synthetic
ggcuuuauucugccggacacc

SEQ ID NO: 15289 - RNA, 22 nt, Artificial Sequence
  Synthetic
gggcuuuauucugccggacacc

SEQ ID NO: 15290 - RNA, 23 nt, Artificial Sequence
  Synthetic
agggcuuuauucugccggacacc

SEQ ID NO: 15291 - RNA, 24 nt, Artificial Sequence
  Synthetic
aagggcuuuauucugccggacacc

SEQ ID NO: 15292 - RNA, 18 nt, Artificial Sequence
  Synthetic
ccgacgcaguggcgcacc

SEQ ID NO: 15293 - RNA, 19 nt, Artificial Sequence
  Synthetic
gccgacgcaguggcgcacc

SEQ ID NO: 15294 - RNA, 21 nt, Artificial Sequence
  Synthetic
gggccgacgcaguggcgcacc

SEQ ID NO: 15295 - RNA, 22 nt, Artificial Sequence
  Synthetic
agggccgacgcaguggcgcacc

SEQ ID NO: 15296 - RNA, 23 nt, Artificial Sequence
  Synthetic
gagggccgacgcaguggcgcacc

SEQ ID NO: 15297 - RNA, 24 nt, Artificial Sequence
  Synthetic
ugagggccgacgcaguggcgcacc

SEQ ID NO: 15298 - RNA, 18 nt, Artificial Sequence
  Synthetic
uuccgguggccgggcacc

SEQ ID NO: 15299 - RNA, 19 nt, Artificial Sequence
  Synthetic
uuuccgguggccgggcacc

SEQ ID NO: 15300 - RNA, 21 nt, Artificial Sequence
  Synthetic
ccuuuccgguggccgggcacc

SEQ ID NO: 15301 - RNA, 22 nt, Artificial Sequence
  Synthetic
gccuuuccgguggccgggcacc

SEQ ID NO: 15302 - RNA, 23 nt, Artificial Sequence
  Synthetic
ggccuuuccgguggccgggcacc

SEQ ID NO: 15303 - RNA, 24 nt, Artificial Sequence
  Synthetic
uggccuuuccgguggccgggcacc

SEQ ID NO: 15304 - RNA, 18 nt, Artificial Sequence
  Synthetic
aucggcgcaucaccgacc

SEQ ID NO: 15305 - RNA, 19 nt, Artificial Sequence
  Synthetic
caucggcgcaucaccgacc

SEQ ID NO: 15306 - RNA, 21 nt, Artificial Sequence
  Synthetic
cccaucggcgcaucaccgacc

SEQ ID NO: 15307 - RNA, 22 nt, Artificial Sequence
  Synthetic
gcccaucggcgcaucaccgacc

SEQ ID NO: 15308 - RNA, 23 nt, Artificial Sequence
  Synthetic
cgcccaucggcgcaucaccgacc

SEQ ID NO: 15309 - RNA, 24 nt, Artificial Sequence
  Synthetic
acgcccaucggcgcaucaccgacc

SEQ ID NO: 15310 - RNA, 18 nt, Artificial Sequence
  Synthetic
aggcgggcaaggacuacc

SEQ ID NO: 15311 - RNA, 19 nt, Artificial Sequence
  Synthetic
gaggcgggcaaggacuacc

SEQ ID NO: 15312 - RNA, 21 nt, Artificial Sequence
  Synthetic
uggaggcgggcaaggacuacc

SEQ ID NO: 15313 - RNA, 22 nt, Artificial Sequence
  Synthetic
cuggaggcgggcaaggacuacc

SEQ ID NO: 15314 - RNA, 23 nt, Artificial Sequence
  Synthetic
ccuggaggcgggcaaggacuacc

SEQ ID NO: 15315 - RNA, 24 nt, Artificial Sequence
  Synthetic
accuggaggcgggcaaggacuacc

SEQ ID NO: 15316 - RNA, 18 nt, Artificial Sequence
  Synthetic
gcaggcacgugggguacc

SEQ ID NO: 15317 - RNA, 19 nt, Artificial Sequence
  Synthetic
ggcaggcacgugggguacc

SEQ ID NO: 15318 - RNA, 21 nt, Artificial Sequence
  Synthetic
ccggcaggcacgugggguacc

SEQ ID NO: 15319 - RNA, 22 nt, Artificial Sequence
  Synthetic
gccggcaggcacgugggguacc

SEQ ID NO: 15320 - RNA, 23 nt, Artificial Sequence
  Synthetic
cgccggcaggcacgugggguacc

SEQ ID NO: 15321 - RNA, 24 nt, Artificial Sequence
  Synthetic
ccgccggcaggcacgugggguacc

SEQ ID NO: 15322 - RNA, 18 nt, Artificial Sequence
  Synthetic
uuauucugccggacaccc

SEQ ID NO: 15323 - RNA, 19 nt, Artificial Sequence
  Synthetic
uuuauucugccggacaccc

SEQ ID NO: 15324 - RNA, 21 nt, Artificial Sequence
  Synthetic
gcuuuauucugccggacaccc

SEQ ID NO: 15325 - RNA, 22 nt, Artificial Sequence
  Synthetic
ggcuuuauucugccggacaccc

SEQ ID NO: 15326 - RNA, 23 nt, Artificial Sequence
  Synthetic
gggcuuuauucugccggacaccc

SEQ ID NO: 15327 - RNA, 24 nt, Artificial Sequence
  Synthetic
agggcuuuauucugccggacaccc

SEQ ID NO: 15328 - RNA, 18 nt, Artificial Sequence
  Synthetic
ugaucguggcccagaccc

SEQ ID NO: 15329 - RNA, 19 nt, Artificial Sequence
  Synthetic
gugaucguggcccagaccc

SEQ ID NO: 15330 - RNA, 21 nt, Artificial Sequence
  Synthetic
acgugaucguggcccagaccc

SEQ ID NO: 15331 - RNA, 22 nt, Artificial Sequence
  Synthetic
uacgugaucguggcccagaccc

SEQ ID NO: 15332 - RNA, 23 nt, Artificial Sequence
  Synthetic
guacgugaucguggcccagaccc

SEQ ID NO: 15333 - RNA, 24 nt, Artificial Sequence
  Synthetic
cguacgugaucguggcccagaccc

SEQ ID NO: 15334 - RNA, 18 nt, Artificial Sequence
  Synthetic
cccgaaguguggcacccc

SEQ ID NO: 15335 - RNA, 19 nt, Artificial Sequence
  Synthetic
ucccgaaguguggcacccc

SEQ ID NO: 15336 - RNA, 21 nt, Artificial Sequence
  Synthetic
auucccgaaguguggcacccc

SEQ ID NO: 15337 - RNA, 22 nt, Artificial Sequence
  Synthetic
uauucccgaaguguggcacccc

SEQ ID NO: 15338 - RNA, 23 nt, Artificial Sequence
  Synthetic
uuauucccgaaguguggcacccc

SEQ ID NO: 15339 - RNA, 24 nt, Artificial Sequence
  Synthetic
uuuauucccgaaguguggcacccc

SEQ ID NO: 15340 - RNA, 18 nt, Artificial Sequence
  Synthetic
ccgucgccugccgacccc

SEQ ID NO: 15341 - RNA, 19 nt, Artificial Sequence
  Synthetic
gccgucgccugccgacccc

SEQ ID NO: 15342 - RNA, 21 nt, Artificial Sequence
  Synthetic
acgccgucgccugccgacccc

SEQ ID NO: 15343 - RNA, 22 nt, Artificial Sequence
  Synthetic
gacgccgucgccugccgacccc

SEQ ID NO: 15344 - RNA, 23 nt, Artificial Sequence
  Synthetic
agacgccgucgccugccgacccc

SEQ ID NO: 15345 - RNA, 24 nt, Artificial Sequence
  Synthetic
gagacgccgucgccugccgacccc

SEQ ID NO: 15346 - RNA, 18 nt, Artificial Sequence
  Synthetic
cgucgccugccgaccccc

SEQ ID NO: 15347 - RNA, 19 nt, Artificial Sequence
  Synthetic
ccgucgccugccgaccccc

SEQ ID NO: 15348 - RNA, 21 nt, Artificial Sequence
  Synthetic
cgccgucgccugccgaccccc

SEQ ID NO: 15349 - RNA, 22 nt, Artificial Sequence
  Synthetic
acgccgucgccugccgaccccc

SEQ ID NO: 15350 - RNA, 23 nt, Artificial Sequence
  Synthetic
gacgccgucgccugccgaccccc

SEQ ID NO: 15351 - RNA, 24 nt, Artificial Sequence
  Synthetic
agacgccgucgccugccgaccccc

SEQ ID NO: 15352 - RNA, 18 nt, Artificial Sequence
  Synthetic
gucgccugccgacccccc

SEQ ID NO: 15353 - RNA, 19 nt, Artificial Sequence
  Synthetic
cgucgccugccgacccccc

SEQ ID NO: 15354 - RNA, 21 nt, Artificial Sequence
  Synthetic
gccgucgccugccgacccccc

SEQ ID NO: 15355 - RNA, 22 nt, Artificial Sequence
  Synthetic
cgccgucgccugccgacccccc

SEQ ID NO: 15356 - RNA, 23 nt, Artificial Sequence
  Synthetic
acgccgucgccugccgacccccc

SEQ ID NO: 15357 - RNA, 24 nt, Artificial Sequence
  Synthetic
gacgccgucgccugccgacccccc

SEQ ID NO: 15358 - RNA, 18 nt, Artificial Sequence
  Synthetic
ccccggccaagcgccccc

SEQ ID NO: 15359 - RNA, 19 nt, Artificial Sequence
  Synthetic
uccccggccaagcgccccc

SEQ ID NO: 15360 - RNA, 21 nt, Artificial Sequence
  Synthetic
ccuccccggccaagcgccccc

SEQ ID NO: 15361 - RNA, 22 nt, Artificial Sequence
  Synthetic
cccuccccggccaagcgccccc

SEQ ID NO: 15362 - RNA, 23 nt, Artificial Sequence
  Synthetic
gcccuccccggccaagcgccccc

SEQ ID NO: 15363 - RNA, 24 nt, Artificial Sequence
  Synthetic
ugcccuccccggccaagcgccccc

SEQ ID NO: 15364 - RNA, 18 nt, Artificial Sequence
  Synthetic
auuccccagagcagcccc

SEQ ID NO: 15365 - RNA, 19 nt, Artificial Sequence
  Synthetic
gauuccccagagcagcccc

SEQ ID NO: 15366 - RNA, 21 nt, Artificial Sequence
  Synthetic
cggauuccccagagcagcccc

SEQ ID NO: 15367 - RNA, 22 nt, Artificial Sequence
  Synthetic
gcggauuccccagagcagcccc

SEQ ID NO: 15368 - RNA, 23 nt, Artificial Sequence
  Synthetic
cgcggauuccccagagcagcccc

SEQ ID NO: 15369 - RNA, 24 nt, Artificial Sequence
  Synthetic
ucgcggauuccccagagcagcccc

SEQ ID NO: 15370 - RNA, 18 nt, Artificial Sequence
  Synthetic
gcuagacgccgccgcccc

SEQ ID NO: 15371 - RNA, 19 nt, Artificial Sequence
  Synthetic
agcuagacgccgccgcccc

SEQ ID NO: 15372 - RNA, 21 nt, Artificial Sequence
  Synthetic
cgagcuagacgccgccgcccc

SEQ ID NO: 15373 - RNA, 22 nt, Artificial Sequence
  Synthetic
gcgagcuagacgccgccgcccc

SEQ ID NO: 15374 - RNA, 23 nt, Artificial Sequence
  Synthetic
cgcgagcuagacgccgccgcccc

SEQ ID NO: 15375 - RNA, 24 nt, Artificial Sequence
  Synthetic
ccgcgagcuagacgccgccgcccc

SEQ ID NO: 15376 - RNA, 18 nt, Artificial Sequence
  Synthetic
uccccggccaagcgcccc

SEQ ID NO: 15377 - RNA, 19 nt, Artificial Sequence
  Synthetic
cuccccggccaagcgcccc

SEQ ID NO: 15378 - RNA, 21 nt, Artificial Sequence
  Synthetic
cccuccccggccaagcgcccc

SEQ ID NO: 15379 - RNA, 22 nt, Artificial Sequence
  Synthetic
gcccuccccggccaagcgcccc

SEQ ID NO: 15380 - RNA, 23 nt, Artificial Sequence
  Synthetic
ugcccuccccggccaagcgcccc

SEQ ID NO: 15381 - RNA, 24 nt, Artificial Sequence
  Synthetic
cugcccuccccggccaagcgcccc

SEQ ID NO: 15382 - RNA, 18 nt, Artificial Sequence
  Synthetic
gcguuagccgagcgcccc

SEQ ID NO: 15383 - RNA, 19 nt, Artificial Sequence
  Synthetic
cgcguuagccgagcgcccc

SEQ ID NO: 15384 - RNA, 21 nt, Artificial Sequence
  Synthetic
gccgcguuagccgagcgcccc

SEQ ID NO: 15385 - RNA, 22 nt, Artificial Sequence
  Synthetic
cgccgcguuagccgagcgcccc

SEQ ID NO: 15386 - RNA, 23 nt, Artificial Sequence
  Synthetic
ccgccgcguuagccgagcgcccc

SEQ ID NO: 15387 - RNA, 24 nt, Artificial Sequence
  Synthetic
gccgccgcguuagccgagcgcccc

SEQ ID NO: 15388 - RNA, 18 nt, Artificial Sequence
  Synthetic
ccuacaaugccgcgcccc

SEQ ID NO: 15389 - RNA, 19 nt, Artificial Sequence
  Synthetic
accuacaaugccgcgcccc

SEQ ID NO: 15390 - RNA, 21 nt, Artificial Sequence
  Synthetic
gcaccuacaaugccgcgcccc

SEQ ID NO: 15391 - RNA, 22 nt, Artificial Sequence
  Synthetic
ggcaccuacaaugccgcgcccc

SEQ ID NO: 15392 - RNA, 23 nt, Artificial Sequence
  Synthetic
aggcaccuacaaugccgcgcccc

SEQ ID NO: 15393 - RNA, 24 nt, Artificial Sequence
  Synthetic
caggcaccuacaaugccgcgcccc

SEQ ID NO: 15394 - RNA, 18 nt, Artificial Sequence
  Synthetic
gacauuuacaaggucccc

SEQ ID NO: 15395 - RNA, 19 nt, Artificial Sequence
  Synthetic
ggacauuuacaaggucccc

SEQ ID NO: 15396 - RNA, 21 nt, Artificial Sequence
  Synthetic
acggacauuuacaaggucccc

SEQ ID NO: 15397 - RNA, 22 nt, Artificial Sequence
  Synthetic
gacggacauuuacaaggucccc

SEQ ID NO: 15398 - RNA, 23 nt, Artificial Sequence
  Synthetic
ugacggacauuuacaaggucccc

SEQ ID NO: 15399 - RNA, 24 nt, Artificial Sequence
  Synthetic
cugacggacauuuacaaggucccc

SEQ ID NO: 15400 - RNA, 18 nt, Artificial Sequence
  Synthetic
agcguccggccgcagccc

SEQ ID NO: 15401 - RNA, 19 nt, Artificial Sequence
  Synthetic
aagcguccggccgcagccc

SEQ ID NO: 15402 - RNA, 21 nt, Artificial Sequence
  Synthetic
ccaagcguccggccgcagccc

SEQ ID NO: 15403 - RNA, 22 nt, Artificial Sequence
  Synthetic
cccaagcguccggccgcagccc

SEQ ID NO: 15404 - RNA, 23 nt, Artificial Sequence
  Synthetic
gcccaagcguccggccgcagccc

SEQ ID NO: 15405 - RNA, 24 nt, Artificial Sequence
  Synthetic
cgcccaagcguccggccgcagccc

SEQ ID NO: 15406 - RNA, 18 nt, Artificial Sequence
  Synthetic
accuguccaccaccgccc

SEQ ID NO: 15407 - RNA, 19 nt, Artificial Sequence
  Synthetic
gaccuguccaccaccgccc

SEQ ID NO: 15408 - RNA, 21 nt, Artificial Sequence
  Synthetic
acgaccuguccaccaccgccc

SEQ ID NO: 15409 - RNA, 22 nt, Artificial Sequence
  Synthetic
uacgaccuguccaccaccgccc

SEQ ID NO: 15410 - RNA, 23 nt, Artificial Sequence
  Synthetic
cuacgaccuguccaccaccgccc

SEQ ID NO: 15411 - RNA, 24 nt, Artificial Sequence
  Synthetic
ucuacgaccuguccaccaccgccc

SEQ ID NO: 15412 - RNA, 18 nt, Artificial Sequence
  Synthetic
agcuagacgccgccgccc

SEQ ID NO: 15413 - RNA, 19 nt, Artificial Sequence
  Synthetic
gagcuagacgccgccgccc

SEQ ID NO: 15414 - RNA, 21 nt, Artificial Sequence
  Synthetic
gcgagcuagacgccgccgccc

SEQ ID NO: 15415 - RNA, 22 nt, Artificial Sequence
  Synthetic
cgcgagcuagacgccgccgccc

SEQ ID NO: 15416 - RNA, 23 nt, Artificial Sequence
  Synthetic
ccgcgagcuagacgccgccgccc

SEQ ID NO: 15417 - RNA, 24 nt, Artificial Sequence
  Synthetic
uccgcgagcuagacgccgccgccc

SEQ ID NO: 15418 - RNA, 18 nt, Artificial Sequence
  Synthetic
cuccccggccaagcgccc

SEQ ID NO: 15419 - RNA, 19 nt, Artificial Sequence
  Synthetic
ccuccccggccaagcgccc

SEQ ID NO: 15420 - RNA, 21 nt, Artificial Sequence
  Synthetic
gcccuccccggccaagcgccc

SEQ ID NO: 15421 - RNA, 22 nt, Artificial Sequence
  Synthetic
ugcccuccccggccaagcgccc

SEQ ID NO: 15422 - RNA, 23 nt, Artificial Sequence
  Synthetic
cugcccuccccggccaagcgccc

SEQ ID NO: 15423 - RNA, 24 nt, Artificial Sequence
  Synthetic
ccugcccuccccggccaagcgccc

SEQ ID NO: 15424 - RNA, 18 nt, Artificial Sequence
  Synthetic
cggccgacaugcgcgccc

SEQ ID NO: 15425 - RNA, 19 nt, Artificial Sequence
  Synthetic
gcggccgacaugcgcgccc

SEQ ID NO: 15426 - RNA, 21 nt, Artificial Sequence
  Synthetic
aggcggccgacaugcgcgccc

SEQ ID NO: 15427 - RNA, 22 nt, Artificial Sequence
  Synthetic
gaggcggccgacaugcgcgccc

SEQ ID NO: 15428 - RNA, 23 nt, Artificial Sequence
  Synthetic
ggaggcggccgacaugcgcgccc

SEQ ID NO: 15429 - RNA, 24 nt, Artificial Sequence
  Synthetic
cggaggcggccgacaugcgcgccc

SEQ ID NO: 15430 - RNA, 18 nt, Artificial Sequence
  Synthetic
cuggcgcgaccccugccc

SEQ ID NO: 15431 - RNA, 19 nt, Artificial Sequence
  Synthetic
gcuggcgcgaccccugccc

SEQ ID NO: 15432 - RNA, 21 nt, Artificial Sequence
  Synthetic
uggcuggcgcgaccccugccc

SEQ ID NO: 15433 - RNA, 22 nt, Artificial Sequence
  Synthetic
guggcuggcgcgaccccugccc

SEQ ID NO: 15434 - RNA, 23 nt, Artificial Sequence
  Synthetic
aguggcuggcgcgaccccugccc

SEQ ID NO: 15435 - RNA, 24 nt, Artificial Sequence
  Synthetic
gaguggcuggcgcgaccccugccc

SEQ ID NO: 15436 - RNA, 18 nt, Artificial Sequence
  Synthetic
auccgcucgcggauuccc

SEQ ID NO: 15437 - RNA, 19 nt, Artificial Sequence
  Synthetic
gauccgcucgcggauuccc

SEQ ID NO: 15438 - RNA, 21 nt, Artificial Sequence
  Synthetic
cagauccgcucgcggauuccc

SEQ ID NO: 15439 - RNA, 22 nt, Artificial Sequence
  Synthetic
gcagauccgcucgcggauuccc

SEQ ID NO: 15440 - RNA, 23 nt, Artificial Sequence
  Synthetic
agcagauccgcucgcggauuccc

SEQ ID NO: 15441 - RNA, 24 nt, Artificial Sequence
  Synthetic
aagcagauccgcucgcggauuccc

SEQ ID NO: 15442 - RNA, 18 nt, Artificial Sequence
  Synthetic
ggauuccccagagcagcc

SEQ ID NO: 15443 - RNA, 19 nt, Artificial Sequence
  Synthetic
cggauuccccagagcagcc

SEQ ID NO: 15444 - RNA, 21 nt, Artificial Sequence
  Synthetic
cgcggauuccccagagcagcc

SEQ ID NO: 15445 - RNA, 22 nt, Artificial Sequence
  Synthetic
ucgcggauuccccagagcagcc

SEQ ID NO: 15446 - RNA, 23 nt, Artificial Sequence
  Synthetic
cucgcggauuccccagagcagcc

SEQ ID NO: 15447 - RNA, 24 nt, Artificial Sequence
  Synthetic
gcucgcggauuccccagagcagcc

SEQ ID NO: 15448 - RNA, 18 nt, Artificial Sequence
  Synthetic
aagcguccggccgcagcc

SEQ ID NO: 15449 - RNA, 19 nt, Artificial Sequence
  Synthetic
caagcguccggccgcagcc

SEQ ID NO: 15450 - RNA, 21 nt, Artificial Sequence
  Synthetic
cccaagcguccggccgcagcc

SEQ ID NO: 15451 - RNA, 22 nt, Artificial Sequence
  Synthetic
gcccaagcguccggccgcagcc

SEQ ID NO: 15452 - RNA, 23 nt, Artificial Sequence
  Synthetic
cgcccaagcguccggccgcagcc

SEQ ID NO: 15453 - RNA, 24 nt, Artificial Sequence
  Synthetic
gcgcccaagcguccggccgcagcc

SEQ ID NO: 15454 - RNA, 18 nt, Artificial Sequence
  Synthetic
gaccuguccaccaccgcc

SEQ ID NO: 15455 - RNA, 19 nt, Artificial Sequence
  Synthetic
cgaccuguccaccaccgcc

SEQ ID NO: 15456 - RNA, 21 nt, Artificial Sequence
  Synthetic
uacgaccuguccaccaccgcc

SEQ ID NO: 15457 - RNA, 22 nt, Artificial Sequence
  Synthetic
cuacgaccuguccaccaccgcc

SEQ ID NO: 15458 - RNA, 23 nt, Artificial Sequence
  Synthetic
ucuacgaccuguccaccaccgcc

SEQ ID NO: 15459 - RNA, 24 nt, Artificial Sequence
  Synthetic
cucuacgaccuguccaccaccgcc

SEQ ID NO: 15460 - RNA, 18 nt, Artificial Sequence
  Synthetic
gggcgauuuaggggcgcc

SEQ ID NO: 15461 - RNA, 19 nt, Artificial Sequence
  Synthetic
ggggcgauuuaggggcgcc

SEQ ID NO: 15462 - RNA, 21 nt, Artificial Sequence
  Synthetic
caggggcgauuuaggggcgcc

SEQ ID NO: 15463 - RNA, 22 nt, Artificial Sequence
  Synthetic
ccaggggcgauuuaggggcgcc

SEQ ID NO: 15464 - RNA, 23 nt, Artificial Sequence
  Synthetic
cccaggggcgauuuaggggcgcc

SEQ ID NO: 15465 - RNA, 24 nt, Artificial Sequence
  Synthetic
acccaggggcgauuuaggggcgcc

SEQ ID NO: 15466 - RNA, 18 nt, Artificial Sequence
  Synthetic
aagcugcugcugaucgcc

SEQ ID NO: 15467 - RNA, 19 nt, Artificial Sequence
  Synthetic
caagcugcugcugaucgcc

SEQ ID NO: 15468 - RNA, 21 nt, Artificial Sequence
  Synthetic
accaagcugcugcugaucgcc

SEQ ID NO: 15469 - RNA, 22 nt, Artificial Sequence
  Synthetic
caccaagcugcugcugaucgcc

SEQ ID NO: 15470 - RNA, 23 nt, Artificial Sequence
  Synthetic
ucaccaagcugcugcugaucgcc

SEQ ID NO: 15471 - RNA, 24 nt, Artificial Sequence
  Synthetic
uucaccaagcugcugcugaucgcc

SEQ ID NO: 15472 - RNA, 18 nt, Artificial Sequence
  Synthetic
auugcccacggcgucgcc

SEQ ID NO: 15473 - RNA, 19 nt, Artificial Sequence
  Synthetic
cauugcccacggcgucgcc

SEQ ID NO: 15474 - RNA, 21 nt, Artificial Sequence
  Synthetic
gccauugcccacggcgucgcc

SEQ ID NO: 15475 - RNA, 22 nt, Artificial Sequence
  Synthetic
cgccauugcccacggcgucgcc

SEQ ID NO: 15476 - RNA, 23 nt, Artificial Sequence
  Synthetic
acgccauugcccacggcgucgcc

SEQ ID NO: 15477 - RNA, 24 nt, Artificial Sequence
  Synthetic
uacgccauugcccacggcgucgcc

SEQ ID NO: 15478 - RNA, 18 nt, Artificial Sequence
  Synthetic
gccgccgggcugacggcc

SEQ ID NO: 15479 - RNA, 19 nt, Artificial Sequence
  Synthetic
ggccgccgggcugacggcc

SEQ ID NO: 15480 - RNA, 21 nt, Artificial Sequence
  Synthetic
acggccgccgggcugacggcc

SEQ ID NO: 15481 - RNA, 22 nt, Artificial Sequence
  Synthetic
cacggccgccgggcugacggcc

SEQ ID NO: 15482 - RNA, 23 nt, Artificial Sequence
  Synthetic
ucacggccgccgggcugacggcc

SEQ ID NO: 15483 - RNA, 24 nt, Artificial Sequence
  Synthetic
cucacggccgccgggcugacggcc

SEQ ID NO: 15484 - RNA, 18 nt, Artificial Sequence
  Synthetic
cugaacgagcuggcggcc

SEQ ID NO: 15485 - RNA, 19 nt, Artificial Sequence
  Synthetic
ccugaacgagcuggcggcc

SEQ ID NO: 15486 - RNA, 21 nt, Artificial Sequence
  Synthetic
caccugaacgagcuggcggcc

SEQ ID NO: 15487 - RNA, 22 nt, Artificial Sequence
  Synthetic
ccaccugaacgagcuggcggcc

SEQ ID NO: 15488 - RNA, 23 nt, Artificial Sequence
  Synthetic
cccaccugaacgagcuggcggcc

SEQ ID NO: 15489 - RNA, 24 nt, Artificial Sequence
  Synthetic
ucccaccugaacgagcuggcggcc

SEQ ID NO: 15490 - RNA, 18 nt, Artificial Sequence
  Synthetic
cggugacgaccaucggcc

SEQ ID NO: 15491 - RNA, 19 nt, Artificial Sequence
  Synthetic
acggugacgaccaucggcc

SEQ ID NO: 15492 - RNA, 21 nt, Artificial Sequence
  Synthetic
cgacggugacgaccaucggcc

SEQ ID NO: 15493 - RNA, 22 nt, Artificial Sequence
  Synthetic
gcgacggugacgaccaucggcc

SEQ ID NO: 15494 - RNA, 23 nt, Artificial Sequence
  Synthetic
cgcgacggugacgaccaucggcc

SEQ ID NO: 15495 - RNA, 24 nt, Artificial Sequence
  Synthetic
ccgcgacggugacgaccaucggcc

SEQ ID NO: 15496 - RNA, 18 nt, Artificial Sequence
  Synthetic
cgcggcuggccgcccucc

SEQ ID NO: 15497 - RNA, 19 nt, Artificial Sequence
  Synthetic
gcgcggcuggccgcccucc

SEQ ID NO: 15498 - RNA, 21 nt, Artificial Sequence
  Synthetic
ucgcgcggcuggccgcccucc

SEQ ID NO: 15499 - RNA, 22 nt, Artificial Sequence
  Synthetic
gucgcgcggcuggccgcccucc

SEQ ID NO: 15500 - RNA, 23 nt, Artificial Sequence
  Synthetic
ggucgcgcggcuggccgcccucc

SEQ ID NO: 15501 - RNA, 24 nt, Artificial Sequence
  Synthetic
cggucgcgcggcuggccgcccucc

SEQ ID NO: 15502 - RNA, 18 nt, Artificial Sequence
  Synthetic
ucguuccgcggcaucucc

SEQ ID NO: 15503 - RNA, 19 nt, Artificial Sequence
  Synthetic
gucguuccgcggcaucucc

SEQ ID NO: 15504 - RNA, 21 nt, Artificial Sequence
  Synthetic
gcgucguuccgcggcaucucc

SEQ ID NO: 15505 - RNA, 22 nt, Artificial Sequence
  Synthetic
cgcgucguuccgcggcaucucc

SEQ ID NO: 15506 - RNA, 23 nt, Artificial Sequence
  Synthetic
gcgcgucguuccgcggcaucucc

SEQ ID NO: 15507 - RNA, 24 nt, Artificial Sequence
  Synthetic
ggcgcgucguuccgcggcaucucc

SEQ ID NO: 15508 - RNA, 18 nt, Artificial Sequence
  Synthetic
ugcuucagcacgcucucc

SEQ ID NO: 15509 - RNA, 19 nt, Artificial Sequence
  Synthetic
gugcuucagcacgcucucc

SEQ ID NO: 15510 - RNA, 21 nt, Artificial Sequence
  Synthetic
cugugcuucagcacgcucucc

SEQ ID NO: 15511 - RNA, 22 nt, Artificial Sequence
  Synthetic
ccugugcuucagcacgcucucc

SEQ ID NO: 15512 - RNA, 23 nt, Artificial Sequence
  Synthetic
accugugcuucagcacgcucucc

SEQ ID NO: 15513 - RNA, 24 nt, Artificial Sequence
  Synthetic
aaccugugcuucagcacgcucucc

SEQ ID NO: 15514 - RNA, 18 nt, Artificial Sequence
  Synthetic
gcggcccugcgcgagucc

SEQ ID NO: 15515 - RNA, 19 nt, Artificial Sequence
  Synthetic
cgcggcccugcgcgagucc

SEQ ID NO: 15516 - RNA, 21 nt, Artificial Sequence
  Synthetic
gccgcggcccugcgcgagucc

SEQ ID NO: 15517 - RNA, 22 nt, Artificial Sequence
  Synthetic
ggccgcggcccugcgcgagucc

SEQ ID NO: 15518 - RNA, 23 nt, Artificial Sequence
  Synthetic
uggccgcggcccugcgcgagucc

SEQ ID NO: 15519 - RNA, 24 nt, Artificial Sequence
  Synthetic
auggccgcggcccugcgcgagucc

SEQ ID NO: 15520 - RNA, 18 nt, Artificial Sequence
  Synthetic
agcuccuggccgauuucc

SEQ ID NO: 15521 - RNA, 19 nt, Artificial Sequence
  Synthetic
cagcuccuggccgauuucc

SEQ ID NO: 15522 - RNA, 21 nt, Artificial Sequence
  Synthetic
aacagcuccuggccgauuucc

SEQ ID NO: 15523 - RNA, 22 nt, Artificial Sequence
  Synthetic
gaacagcuccuggccgauuucc

SEQ ID NO: 15524 - RNA, 23 nt, Artificial Sequence
  Synthetic
cgaacagcuccuggccgauuucc

SEQ ID NO: 15525 - RNA, 24 nt, Artificial Sequence
  Synthetic
ucgaacagcuccuggccgauuucc

SEQ ID NO: 15526 - RNA, 18 nt, Artificial Sequence
  Synthetic
caagcguccggccgcagc

SEQ ID NO: 15527 - RNA, 19 nt, Artificial Sequence
  Synthetic
ccaagcguccggccgcagc

SEQ ID NO: 15528 - RNA, 21 nt, Artificial Sequence
  Synthetic
gcccaagcguccggccgcagc

SEQ ID NO: 15529 - RNA, 22 nt, Artificial Sequence
  Synthetic
cgcccaagcguccggccgcagc

SEQ ID NO: 15530 - RNA, 23 nt, Artificial Sequence
  Synthetic
gcgcccaagcguccggccgcagc

SEQ ID NO: 15531 - RNA, 24 nt, Artificial Sequence
  Synthetic
ggcgcccaagcguccggccgcagc

SEQ ID NO: 15532 - RNA, 18 nt, Artificial Sequence
  Synthetic
gguucacgggagugcagc

SEQ ID NO: 15533 - RNA, 19 nt, Artificial Sequence
  Synthetic
ggguucacgggagugcagc

SEQ ID NO: 15534 - RNA, 21 nt, Artificial Sequence
  Synthetic
acggguucacgggagugcagc

SEQ ID NO: 15535 - RNA, 22 nt, Artificial Sequence
  Synthetic
uacggguucacgggagugcagc

SEQ ID NO: 15536 - RNA, 23 nt, Artificial Sequence
  Synthetic
guacggguucacgggagugcagc

SEQ ID NO: 15537 - RNA, 24 nt, Artificial Sequence
  Synthetic
uguacggguucacgggagugcagc

SEQ ID NO: 15538 - RNA, 18 nt, Artificial Sequence
  Synthetic
aggagggcgggggcgagc

SEQ ID NO: 15539 - RNA, 19 nt, Artificial Sequence
  Synthetic
gaggagggcgggggcgagc

SEQ ID NO: 15540 - RNA, 21 nt, Artificial Sequence
  Synthetic
gcgaggagggcgggggcgagc

SEQ ID NO: 15541 - RNA, 22 nt, Artificial Sequence
  Synthetic
cgcgaggagggcgggggcgagc

SEQ ID NO: 15542 - RNA, 23 nt, Artificial Sequence
  Synthetic
acgcgaggagggcgggggcgagc

SEQ ID NO: 15543 - RNA, 24 nt, Artificial Sequence
  Synthetic
aacgcgaggagggcgggggcgagc

SEQ ID NO: 15544 - RNA, 18 nt, Artificial Sequence
  Synthetic
gcgggggcgagcgggagc

SEQ ID NO: 15545 - RNA, 19 nt, Artificial Sequence
  Synthetic
ggcgggggcgagcgggagc

SEQ ID NO: 15546 - RNA, 21 nt, Artificial Sequence
  Synthetic
agggcgggggcgagcgggagc

SEQ ID NO: 15547 - RNA, 22 nt, Artificial Sequence
  Synthetic
gagggcgggggcgagcgggagc

SEQ ID NO: 15548 - RNA, 23 nt, Artificial Sequence
  Synthetic
ggagggcgggggcgagcgggagc

SEQ ID NO: 15549 - RNA, 24 nt, Artificial Sequence
  Synthetic
aggagggcgggggcgagcgggagc

SEQ ID NO: 15550 - RNA, 18 nt, Artificial Sequence
  Synthetic
gaggacgaggacgaacgc

SEQ ID NO: 15551 - RNA, 19 nt, Artificial Sequence
  Synthetic
ggaggacgaggacgaacgc

SEQ ID NO: 15552 - RNA, 21 nt, Artificial Sequence
  Synthetic
ggggaggacgaggacgaacgc

SEQ ID NO: 15553 - RNA, 22 nt, Artificial Sequence
  Synthetic
gggggaggacgaggacgaacgc

SEQ ID NO: 15554 - RNA, 23 nt, Artificial Sequence
  Synthetic
agggggaggacgaggacgaacgc

SEQ ID NO: 15555 - RNA, 24 nt, Artificial Sequence
  Synthetic
gagggggaggacgaggacgaacgc

SEQ ID NO: 15556 - RNA, 18 nt, Artificial Sequence
  Synthetic
cuggacggguacggccgc

SEQ ID NO: 15557 - RNA, 19 nt, Artificial Sequence
  Synthetic
ccuggacggguacggccgc

SEQ ID NO: 15558 - RNA, 21 nt, Artificial Sequence
  Synthetic
ccccuggacggguacggccgc

SEQ ID NO: 15559 - RNA, 22 nt, Artificial Sequence
  Synthetic
cccccuggacggguacggccgc

SEQ ID NO: 15560 - RNA, 23 nt, Artificial Sequence
  Synthetic
ucccccuggacggguacggccgc

SEQ ID NO: 15561 - RNA, 24 nt, Artificial Sequence
  Synthetic
gucccccuggacggguacggccgc

SEQ ID NO: 15562 - RNA, 18 nt, Artificial Sequence
  Synthetic
gggagccggagggcgcgc

SEQ ID NO: 15563 - RNA, 19 nt, Artificial Sequence
  Synthetic
cgggagccggagggcgcgc

SEQ ID NO: 15564 - RNA, 21 nt, Artificial Sequence
  Synthetic
agcgggagccggagggcgcgc

SEQ ID NO: 15565 - RNA, 22 nt, Artificial Sequence
  Synthetic
gagcgggagccggagggcgcgc

SEQ ID NO: 15566 - RNA, 23 nt, Artificial Sequence
  Synthetic
cgagcgggagccggagggcgcgc

SEQ ID NO: 15567 - RNA, 24 nt, Artificial Sequence
  Synthetic
gcgagcgggagccggagggcgcgc

SEQ ID NO: 15568 - RNA, 18 nt, Artificial Sequence
  Synthetic
gcgggagccggagggcgc

SEQ ID NO: 15569 - RNA, 19 nt, Artificial Sequence
  Synthetic
agcgggagccggagggcgc

SEQ ID NO: 15570 - RNA, 21 nt, Artificial Sequence
  Synthetic
cgagcgggagccggagggcgc

SEQ ID NO: 15571 - RNA, 22 nt, Artificial Sequence
  Synthetic
gcgagcgggagccggagggcgc

SEQ ID NO: 15572 - RNA, 23 nt, Artificial Sequence
  Synthetic
ggcgagcgggagccggagggcgc

SEQ ID NO: 15573 - RNA, 24 nt, Artificial Sequence
  Synthetic
gggcgagcgggagccggagggcgc

SEQ ID NO: 15574 - RNA, 18 nt, Artificial Sequence
  Synthetic
ggggcgauuuaggggcgc

SEQ ID NO: 15575 - RNA, 19 nt, Artificial Sequence
  Synthetic
aggggcgauuuaggggcgc

SEQ ID NO: 15576 - RNA, 21 nt, Artificial Sequence
  Synthetic
ccaggggcgauuuaggggcgc

SEQ ID NO: 15577 - RNA, 22 nt, Artificial Sequence
  Synthetic
cccaggggcgauuuaggggcgc

SEQ ID NO: 15578 - RNA, 23 nt, Artificial Sequence
  Synthetic
acccaggggcgauuuaggggcgc

SEQ ID NO: 15579 - RNA, 24 nt, Artificial Sequence
  Synthetic
cacccaggggcgauuuaggggcgc

SEQ ID NO: 15580 - RNA, 18 nt, Artificial Sequence
  Synthetic
cgauaucgaaugcaaggc

SEQ ID NO: 15581 - RNA, 19 nt, Artificial Sequence
  Synthetic
ucgauaucgaaugcaaggc

SEQ ID NO: 15582 - RNA, 21 nt, Artificial Sequence
  Synthetic
cuucgauaucgaaugcaaggc

SEQ ID NO: 15583 - RNA, 22 nt, Artificial Sequence
  Synthetic
gcuucgauaucgaaugcaaggc

SEQ ID NO: 15584 - RNA, 23 nt, Artificial Sequence
  Synthetic
ugcuucgauaucgaaugcaaggc

SEQ ID NO: 15585 - RNA, 24 nt, Artificial Sequence
  Synthetic
gugcuucgauaucgaaugcaaggc

SEQ ID NO: 15586 - RNA, 18 nt, Artificial Sequence
  Synthetic
cgcgugugggacauaggc

SEQ ID NO: 15587 - RNA, 19 nt, Artificial Sequence
  Synthetic
ucgcgugugggacauaggc

SEQ ID NO: 15588 - RNA, 21 nt, Artificial Sequence
  Synthetic
uuucgcgugugggacauaggc

SEQ ID NO: 15589 - RNA, 22 nt, Artificial Sequence
  Synthetic
guuucgcgugugggacauaggc

SEQ ID NO: 15590 - RNA, 23 nt, Artificial Sequence
  Synthetic
uguuucgcgugugggacauaggc

SEQ ID NO: 15591 - RNA, 24 nt, Artificial Sequence
  Synthetic
guguuucgcgugugggacauaggc

SEQ ID NO: 15592 - RNA, 18 nt, Artificial Sequence
  Synthetic
uacggccgcaugaacggc

SEQ ID NO: 15593 - RNA, 19 nt, Artificial Sequence
  Synthetic
guacggccgcaugaacggc

SEQ ID NO: 15594 - RNA, 21 nt, Artificial Sequence
  Synthetic
ggguacggccgcaugaacggc

SEQ ID NO: 15595 - RNA, 22 nt, Artificial Sequence
  Synthetic
cggguacggccgcaugaacggc

SEQ ID NO: 15596 - RNA, 23 nt, Artificial Sequence
  Synthetic
acggguacggccgcaugaacggc

SEQ ID NO: 15597 - RNA, 24 nt, Artificial Sequence
  Synthetic
gacggguacggccgcaugaacggc

SEQ ID NO: 15598 - RNA, 18 nt, Artificial Sequence
  Synthetic
gggaggacgaggagcggc

SEQ ID NO: 15599 - RNA, 19 nt, Artificial Sequence
  Synthetic
cgggaggacgaggagcggc

SEQ ID NO: 15600 - RNA, 21 nt, Artificial Sequence
  Synthetic
cccgggaggacgaggagcggc

SEQ ID NO: 15601 - RNA, 22 nt, Artificial Sequence
  Synthetic
gcccgggaggacgaggagcggc

SEQ ID NO: 15602 - RNA, 23 nt, Artificial Sequence
  Synthetic
agcccgggaggacgaggagcggc

SEQ ID NO: 15603 - RNA, 24 nt, Artificial Sequence
  Synthetic
cagcccgggaggacgaggagcggc

SEQ ID NO: 15604 - RNA, 18 nt, Artificial Sequence
  Synthetic
ccugaacgagcuggcggc

SEQ ID NO: 15605 - RNA, 19 nt, Artificial Sequence
  Synthetic
accugaacgagcuggcggc

SEQ ID NO: 15606 - RNA, 21 nt, Artificial Sequence
  Synthetic
ccaccugaacgagcuggcggc

SEQ ID NO: 15607 - RNA, 22 nt, Artificial Sequence
  Synthetic
cccaccugaacgagcuggcggc

SEQ ID NO: 15608 - RNA, 23 nt, Artificial Sequence
  Synthetic
ucccaccugaacgagcuggcggc

SEQ ID NO: 15609 - RNA, 24 nt, Artificial Sequence
  Synthetic
aucccaccugaacgagcuggcggc

SEQ ID NO: 15610 - RNA, 18 nt, Artificial Sequence
  Synthetic
gacgaacgcgaggagggc

SEQ ID NO: 15611 - RNA, 19 nt, Artificial Sequence
  Synthetic
ggacgaacgcgaggagggc

SEQ ID NO: 15612 - RNA, 21 nt, Artificial Sequence
  Synthetic
gaggacgaacgcgaggagggc

SEQ ID NO: 15613 - RNA, 22 nt, Artificial Sequence
  Synthetic
cgaggacgaacgcgaggagggc

SEQ ID NO: 15614 - RNA, 23 nt, Artificial Sequence
  Synthetic
acgaggacgaacgcgaggagggc

SEQ ID NO: 15615 - RNA, 24 nt, Artificial Sequence
  Synthetic
gacgaggacgaacgcgaggagggc

SEQ ID NO: 15616 - RNA, 18 nt, Artificial Sequence
  Synthetic
uaccgucucaaaccgggc

SEQ ID NO: 15617 - RNA, 19 nt, Artificial Sequence
  Synthetic
guaccgucucaaaccgggc

SEQ ID NO: 15618 - RNA, 21 nt, Artificial Sequence
  Synthetic
ugguaccgucucaaaccgggc

SEQ ID NO: 15619 - RNA, 22 nt, Artificial Sequence
  Synthetic
cugguaccgucucaaaccgggc

SEQ ID NO: 15620 - RNA, 23 nt, Artificial Sequence
  Synthetic
gcugguaccgucucaaaccgggc

SEQ ID NO: 15621 - RNA, 24 nt, Artificial Sequence
  Synthetic
ggcugguaccgucucaaaccgggc

SEQ ID NO: 15622 - RNA, 18 nt, Artificial Sequence
  Synthetic
gcgcaccuggaggcgggc

SEQ ID NO: 15623 - RNA, 19 nt, Artificial Sequence
  Synthetic
ggcgcaccuggaggcgggc

SEQ ID NO: 15624 - RNA, 21 nt, Artificial Sequence
  Synthetic
guggcgcaccuggaggcgggc

SEQ ID NO: 15625 - RNA, 22 nt, Artificial Sequence
  Synthetic
aguggcgcaccuggaggcgggc

SEQ ID NO: 15626 - RNA, 23 nt, Artificial Sequence
  Synthetic
caguggcgcaccuggaggcgggc

SEQ ID NO: 15627 - RNA, 24 nt, Artificial Sequence
  Synthetic
gcaguggcgcaccuggaggcgggc

SEQ ID NO: 15628 - RNA, 18 nt, Artificial Sequence
  Synthetic
cuggccaucgaggggggc

SEQ ID NO: 15629 - RNA, 19 nt, Artificial Sequence
  Synthetic
ccuggccaucgaggggggc

SEQ ID NO: 15630 - RNA, 21 nt, Artificial Sequence
  Synthetic
aaccuggccaucgaggggggc

SEQ ID NO: 15631 - RNA, 22 nt, Artificial Sequence
  Synthetic
caaccuggccaucgaggggggc

SEQ ID NO: 15632 - RNA, 23 nt, Artificial Sequence
  Synthetic
acaaccuggccaucgaggggggc

SEQ ID NO: 15633 - RNA, 24 nt, Artificial Sequence
  Synthetic
gacaaccuggccaucgaggggggc

SEQ ID NO: 15634 - RNA, 18 nt, Artificial Sequence
  Synthetic
ggcuggcgcgaccccugc

SEQ ID NO: 15635 - RNA, 19 nt, Artificial Sequence
  Synthetic
uggcuggcgcgaccccugc

SEQ ID NO: 15636 - RNA, 21 nt, Artificial Sequence
  Synthetic
aguggcuggcgcgaccccugc

SEQ ID NO: 15637 - RNA, 22 nt, Artificial Sequence
  Synthetic
gaguggcuggcgcgaccccugc

SEQ ID NO: 15638 - RNA, 23 nt, Artificial Sequence
  Synthetic
ggaguggcuggcgcgaccccugc

SEQ ID NO: 15639 - RNA, 24 nt, Artificial Sequence
  Synthetic
aggaguggcuggcgcgaccccugc

SEQ ID NO: 15640 - RNA, 18 nt, Artificial Sequence
  Synthetic
ucgucaaggcucacgugc

SEQ ID NO: 15641 - RNA, 19 nt, Artificial Sequence
  Synthetic
uucgucaaggcucacgugc

SEQ ID NO: 15642 - RNA, 21 nt, Artificial Sequence
  Synthetic
ucuucgucaaggcucacgugc

SEQ ID NO: 15643 - RNA, 22 nt, Artificial Sequence
  Synthetic
uucuucgucaaggcucacgugc

SEQ ID NO: 15644 - RNA, 23 nt, Artificial Sequence
  Synthetic
guucuucgucaaggcucacgugc

SEQ ID NO: 15645 - RNA, 24 nt, Artificial Sequence
  Synthetic
uguucuucgucaaggcucacgugc

SEQ ID NO: 15646 - RNA, 18 nt, Artificial Sequence
  Synthetic
gacccggagagggacauc

SEQ ID NO: 15647 - RNA, 19 nt, Artificial Sequence
  Synthetic
cgacccggagagggacauc

SEQ ID NO: 15648 - RNA, 21 nt, Artificial Sequence
  Synthetic
accgacccggagagggacauc

SEQ ID NO: 15649 - RNA, 22 nt, Artificial Sequence
  Synthetic
caccgacccggagagggacauc

SEQ ID NO: 15650 - RNA, 23 nt, Artificial Sequence
  Synthetic
ucaccgacccggagagggacauc

SEQ ID NO: 15651 - RNA, 24 nt, Artificial Sequence
  Synthetic
aucaccgacccggagagggacauc

SEQ ID NO: 15652 - RNA, 18 nt, Artificial Sequence
  Synthetic
uuaaguuuuugccccauc

SEQ ID NO: 15653 - RNA, 19 nt, Artificial Sequence
  Synthetic
uuuaaguuuuugccccauc

SEQ ID NO: 15654 - RNA, 21 nt, Artificial Sequence
  Synthetic
uuuuuaaguuuuugccccauc

SEQ ID NO: 15655 - RNA, 22 nt, Artificial Sequence
  Synthetic
uuuuuuaaguuuuugccccauc

SEQ ID NO: 15656 - RNA, 23 nt, Artificial Sequence
  Synthetic
guuuuuuaaguuuuugccccauc

SEQ ID NO: 15657 - RNA, 24 nt, Artificial Sequence
  Synthetic
uguuuuuuaaguuuuugccccauc

SEQ ID NO: 15658 - RNA, 18 nt, Artificial Sequence
  Synthetic
aacuucugcccggccauc

SEQ ID NO: 15659 - RNA, 19 nt, Artificial Sequence
  Synthetic
caacuucugcccggccauc

SEQ ID NO: 15660 - RNA, 21 nt, Artificial Sequence
  Synthetic
gacaacuucugcccggccauc

SEQ ID NO: 15661 - RNA, 22 nt, Artificial Sequence
  Synthetic
cgacaacuucugcccggccauc

SEQ ID NO: 15662 - RNA, 23 nt, Artificial Sequence
  Synthetic
gcgacaacuucugcccggccauc

SEQ ID NO: 15663 - RNA, 24 nt, Artificial Sequence
  Synthetic
ugcgacaacuucugcccggccauc

SEQ ID NO: 15664 - RNA, 18 nt, Artificial Sequence
  Synthetic
gcggacaaccuggccauc

SEQ ID NO: 15665 - RNA, 19 nt, Artificial Sequence
  Synthetic
ggcggacaaccuggccauc

SEQ ID NO: 15666 - RNA, 21 nt, Artificial Sequence
  Synthetic
acggcggacaaccuggccauc

SEQ ID NO: 15667 - RNA, 22 nt, Artificial Sequence
  Synthetic
uacggcggacaaccuggccauc

SEQ ID NO: 15668 - RNA, 23 nt, Artificial Sequence
  Synthetic
guacggcggacaaccuggccauc

SEQ ID NO: 15669 - RNA, 24 nt, Artificial Sequence
  Synthetic
uguacggcggacaaccuggccauc

SEQ ID NO: 15670 - RNA, 18 nt, Artificial Sequence
  Synthetic
gcgcaggucccguccauc

SEQ ID NO: 15671 - RNA, 19 nt, Artificial Sequence
  Synthetic
cgcgcaggucccguccauc

SEQ ID NO: 15672 - RNA, 21 nt, Artificial Sequence
  Synthetic
cgcgcgcaggucccguccauc

SEQ ID NO: 15673 - RNA, 22 nt, Artificial Sequence
  Synthetic
ccgcgcgcaggucccguccauc

SEQ ID NO: 15674 - RNA, 23 nt, Artificial Sequence
  Synthetic
gccgcgcgcaggucccguccauc

SEQ ID NO: 15675 - RNA, 24 nt, Artificial Sequence
  Synthetic
cgccgcgcgcaggucccguccauc

SEQ ID NO: 15676 - RNA, 18 nt, Artificial Sequence
  Synthetic
ggggguaagaugcucauc

SEQ ID NO: 15677 - RNA, 19 nt, Artificial Sequence
  Synthetic
cggggguaagaugcucauc

SEQ ID NO: 15678 - RNA, 21 nt, Artificial Sequence
  Synthetic
uacggggguaagaugcucauc

SEQ ID NO: 15679 - RNA, 22 nt, Artificial Sequence
  Synthetic
cuacggggguaagaugcucauc

SEQ ID NO: 15680 - RNA, 23 nt, Artificial Sequence
  Synthetic
ucuacggggguaagaugcucauc

SEQ ID NO: 15681 - RNA, 24 nt, Artificial Sequence
  Synthetic
aucuacggggguaagaugcucauc

SEQ ID NO: 15682 - RNA, 18 nt, Artificial Sequence
  Synthetic
gccaccacccgguucauc

SEQ ID NO: 15683 - RNA, 19 nt, Artificial Sequence
  Synthetic
cgccaccacccgguucauc

SEQ ID NO: 15684 - RNA, 21 nt, Artificial Sequence
  Synthetic
gacgccaccacccgguucauc

SEQ ID NO: 15685 - RNA, 22 nt, Artificial Sequence
  Synthetic
cgacgccaccacccgguucauc

SEQ ID NO: 15686 - RNA, 23 nt, Artificial Sequence
  Synthetic
ucgacgccaccacccgguucauc

SEQ ID NO: 15687 - RNA, 24 nt, Artificial Sequence
  Synthetic
gucgacgccaccacccgguucauc

SEQ ID NO: 15688 - RNA, 18 nt, Artificial Sequence
  Synthetic
cgcuccugggccugacuc

SEQ ID NO: 15689 - RNA, 19 nt, Artificial Sequence
  Synthetic
acgcuccugggccugacuc

SEQ ID NO: 15690 - RNA, 21 nt, Artificial Sequence
  Synthetic
ucacgcuccugggccugacuc

SEQ ID NO: 15691 - RNA, 22 nt, Artificial Sequence
  Synthetic
aucacgcuccugggccugacuc

SEQ ID NO: 15692 - RNA, 23 nt, Artificial Sequence
  Synthetic
caucacgcuccugggccugacuc

SEQ ID NO: 15693 - RNA, 24 nt, Artificial Sequence
  Synthetic
ucaucacgcuccugggccugacuc

SEQ ID NO: 15694 - RNA, 18 nt, Artificial Sequence
  Synthetic
guuuaucaaccgcaccuc

SEQ ID NO: 15695 - RNA, 19 nt, Artificial Sequence
  Synthetic
cguuuaucaaccgcaccuc

SEQ ID NO: 15696 - RNA, 21 nt, Artificial Sequence
  Synthetic
cgcguuuaucaaccgcaccuc

SEQ ID NO: 15697 - RNA, 22 nt, Artificial Sequence
  Synthetic
gcgcguuuaucaaccgcaccuc

SEQ ID NO: 15698 - RNA, 23 nt, Artificial Sequence
  Synthetic
ugcgcguuuaucaaccgcaccuc

SEQ ID NO: 15699 - RNA, 24 nt, Artificial Sequence
  Synthetic
cugcgcguuuaucaaccgcaccuc

SEQ ID NO: 15700 - RNA, 18 nt, Artificial Sequence
  Synthetic
accgacaagaucaagcuc

SEQ ID NO: 15701 - RNA, 19 nt, Artificial Sequence
  Synthetic
aaccgacaagaucaagcuc

SEQ ID NO: 15702 - RNA, 21 nt, Artificial Sequence
  Synthetic
auaaccgacaagaucaagcuc

SEQ ID NO: 15703 - RNA, 22 nt, Artificial Sequence
  Synthetic
uauaaccgacaagaucaagcuc

SEQ ID NO: 15704 - RNA, 23 nt, Artificial Sequence
  Synthetic
uuauaaccgacaagaucaagcuc

SEQ ID NO: 15705 - RNA, 24 nt, Artificial Sequence
  Synthetic
auuauaaccgacaagaucaagcuc

SEQ ID NO: 15706 - RNA, 18 nt, Artificial Sequence
  Synthetic
gggaccgucaucacgcuc

SEQ ID NO: 15707 - RNA, 19 nt, Artificial Sequence
  Synthetic
ggggaccgucaucacgcuc

SEQ ID NO: 15708 - RNA, 21 nt, Artificial Sequence
  Synthetic
acggggaccgucaucacgcuc

SEQ ID NO: 15709 - RNA, 22 nt, Artificial Sequence
  Synthetic
gacggggaccgucaucacgcuc

SEQ ID NO: 15710 - RNA, 23 nt, Artificial Sequence
  Synthetic
cgacggggaccgucaucacgcuc

SEQ ID NO: 15711 - RNA, 24 nt, Artificial Sequence
  Synthetic
ccgacggggaccgucaucacgcuc

SEQ ID NO: 15712 - RNA, 18 nt, Artificial Sequence
  Synthetic
cccgaggaggccgugcuc

SEQ ID NO: 15713 - RNA, 19 nt, Artificial Sequence
  Synthetic
ccccgaggaggccgugcuc

SEQ ID NO: 15714 - RNA, 21 nt, Artificial Sequence
  Synthetic
agccccgaggaggccgugcuc

SEQ ID NO: 15715 - RNA, 22 nt, Artificial Sequence
  Synthetic
cagccccgaggaggccgugcuc

SEQ ID NO: 15716 - RNA, 23 nt, Artificial Sequence
  Synthetic
gcagccccgaggaggccgugcuc

SEQ ID NO: 15717 - RNA, 24 nt, Artificial Sequence
  Synthetic
agcagccccgaggaggccgugcuc

SEQ ID NO: 15718 - RNA, 18 nt, Artificial Sequence
  Synthetic
uuacgacgauaccgucuc

SEQ ID NO: 15719 - RNA, 19 nt, Artificial Sequence
  Synthetic
uuuacgacgauaccgucuc

SEQ ID NO: 15720 - RNA, 21 nt, Artificial Sequence
  Synthetic
guuuuacgacgauaccgucuc

SEQ ID NO: 15721 - RNA, 22 nt, Artificial Sequence
  Synthetic
uguuuuacgacgauaccgucuc

SEQ ID NO: 15722 - RNA, 23 nt, Artificial Sequence
  Synthetic
cuguuuuacgacgauaccgucuc

SEQ ID NO: 15723 - RNA, 24 nt, Artificial Sequence
  Synthetic
gcuguuuuacgacgauaccgucuc

SEQ ID NO: 15724 - RNA, 18 nt, Artificial Sequence
  Synthetic
gccguggccgaagccguc

SEQ ID NO: 15725 - RNA, 19 nt, Artificial Sequence
  Synthetic
cgccguggccgaagccguc

SEQ ID NO: 15726 - RNA, 21 nt, Artificial Sequence
  Synthetic
aacgccguggccgaagccguc

SEQ ID NO: 15727 - RNA, 22 nt, Artificial Sequence
  Synthetic
caacgccguggccgaagccguc

SEQ ID NO: 15728 - RNA, 23 nt, Artificial Sequence
  Synthetic
ucaacgccguggccgaagccguc

SEQ ID NO: 15729 - RNA, 24 nt, Artificial Sequence
  Synthetic
cucaacgccguggccgaagccguc

SEQ ID NO: 15730 - RNA, 18 nt, Artificial Sequence
  Synthetic
uguuaaaaagguuuauuc

SEQ ID NO: 15731 - RNA, 19 nt, Artificial Sequence
  Synthetic
cuguuaaaaagguuuauuc

SEQ ID NO: 15732 - RNA, 21 nt, Artificial Sequence
  Synthetic
gucuguuaaaaagguuuauuc

SEQ ID NO: 15733 - RNA, 22 nt, Artificial Sequence
  Synthetic
agucuguuaaaaagguuuauuc

SEQ ID NO: 15734 - RNA, 23 nt, Artificial Sequence
  Synthetic
gagucuguuaaaaagguuuauuc

SEQ ID NO: 15735 - RNA, 24 nt, Artificial Sequence
  Synthetic
agagucuguuaaaaagguuuauuc

SEQ ID NO: 15736 - RNA, 18 nt, Artificial Sequence
  Synthetic
auaggccagagccacuuc

SEQ ID NO: 15737 - RNA, 19 nt, Artificial Sequence
  Synthetic
cauaggccagagccacuuc

SEQ ID NO: 15738 - RNA, 21 nt, Artificial Sequence
  Synthetic
gacauaggccagagccacuuc

SEQ ID NO: 15739 - RNA, 22 nt, Artificial Sequence
  Synthetic
ggacauaggccagagccacuuc

SEQ ID NO: 15740 - RNA, 23 nt, Artificial Sequence
  Synthetic
gggacauaggccagagccacuuc

SEQ ID NO: 15741 - RNA, 24 nt, Artificial Sequence
  Synthetic
ugggacauaggccagagccacuuc

SEQ ID NO: 15742 - RNA, 18 nt, Artificial Sequence
  Synthetic
aacucgguguacggguuc

SEQ ID NO: 15743 - RNA, 19 nt, Artificial Sequence
  Synthetic
uaacucgguguacggguuc

SEQ ID NO: 15744 - RNA, 21 nt, Artificial Sequence
  Synthetic
uguaacucgguguacggguuc

SEQ ID NO: 15745 - RNA, 22 nt, Artificial Sequence
  Synthetic
guguaacucgguguacggguuc

SEQ ID NO: 15746 - RNA, 23 nt, Artificial Sequence
  Synthetic
uguguaacucgguguacggguuc

SEQ ID NO: 15747 - RNA, 24 nt, Artificial Sequence
  Synthetic
guguguaacucgguguacggguuc

SEQ ID NO: 15748 - RNA, 18 nt, Artificial Sequence
  Synthetic
cagcuccuggccgauuuc

SEQ ID NO: 15749 - RNA, 19 nt, Artificial Sequence
  Synthetic
acagcuccuggccgauuuc

SEQ ID NO: 15750 - RNA, 21 nt, Artificial Sequence
  Synthetic
gaacagcuccuggccgauuuc

SEQ ID NO: 15751 - RNA, 22 nt, Artificial Sequence
  Synthetic
cgaacagcuccuggccgauuuc

SEQ ID NO: 15752 - RNA, 23 nt, Artificial Sequence
  Synthetic
ucgaacagcuccuggccgauuuc

SEQ ID NO: 15753 - RNA, 24 nt, Artificial Sequence
  Synthetic
uucgaacagcuccuggccgauuuc

SEQ ID NO: 15754 - RNA, 18 nt, Artificial Sequence
  Synthetic
aagcgcagcaagauaaag

SEQ ID NO: 15755 - RNA, 19 nt, Artificial Sequence
  Synthetic
gaagcgcagcaagauaaag

SEQ ID NO: 15756 - RNA, 21 nt, Artificial Sequence
  Synthetic
cagaagcgcagcaagauaaag

SEQ ID NO: 15757 - RNA, 22 nt, Artificial Sequence
  Synthetic
ccagaagcgcagcaagauaaag

SEQ ID NO: 15758 - RNA, 23 nt, Artificial Sequence
  Synthetic
uccagaagcgcagcaagauaaag

SEQ ID NO: 15759 - RNA, 24 nt, Artificial Sequence
  Synthetic
uuccagaagcgcagcaagauaaag

SEQ ID NO: 15760 - RNA, 18 nt, Artificial Sequence
  Synthetic
uacuuuuacaugaacaag

SEQ ID NO: 15761 - RNA, 19 nt, Artificial Sequence
  Synthetic
guacuuuuacaugaacaag

SEQ ID NO: 15762 - RNA, 21 nt, Artificial Sequence
  Synthetic
caguacuuuuacaugaacaag

SEQ ID NO: 15763 - RNA, 22 nt, Artificial Sequence
  Synthetic
gcaguacuuuuacaugaacaag

SEQ ID NO: 15764 - RNA, 23 nt, Artificial Sequence
  Synthetic
ggcaguacuuuuacaugaacaag

SEQ ID NO: 15765 - RNA, 24 nt, Artificial Sequence
  Synthetic
cggcaguacuuuuacaugaacaag

SEQ ID NO: 15766 - RNA, 18 nt, Artificial Sequence
  Synthetic
gccguccugaaggacaag

SEQ ID NO: 15767 - RNA, 19 nt, Artificial Sequence
  Synthetic
agccguccugaaggacaag

SEQ ID NO: 15768 - RNA, 21 nt, Artificial Sequence
  Synthetic
gaagccguccugaaggacaag

SEQ ID NO: 15769 - RNA, 22 nt, Artificial Sequence
  Synthetic
cgaagccguccugaaggacaag

SEQ ID NO: 15770 - RNA, 23 nt, Artificial Sequence
  Synthetic
ccgaagccguccugaaggacaag

SEQ ID NO: 15771 - RNA, 24 nt, Artificial Sequence
  Synthetic
gccgaagccguccugaaggacaag

SEQ ID NO: 15772 - RNA, 18 nt, Artificial Sequence
  Synthetic
uucgauaucgaaugcaag

SEQ ID NO: 15773 - RNA, 19 nt, Artificial Sequence
  Synthetic
cuucgauaucgaaugcaag

SEQ ID NO: 15774 - RNA, 21 nt, Artificial Sequence
  Synthetic
ugcuucgauaucgaaugcaag

SEQ ID NO: 15775 - RNA, 22 nt, Artificial Sequence
  Synthetic
gugcuucgauaucgaaugcaag

SEQ ID NO: 15776 - RNA, 23 nt, Artificial Sequence
  Synthetic
ugugcuucgauaucgaaugcaag

SEQ ID NO: 15777 - RNA, 24 nt, Artificial Sequence
  Synthetic
augugcuucgauaucgaaugcaag

SEQ ID NO: 15778 - RNA, 18 nt, Artificial Sequence
  Synthetic
guccugaaggacaagaag

SEQ ID NO: 15779 - RNA, 19 nt, Artificial Sequence
  Synthetic
cguccugaaggacaagaag

SEQ ID NO: 15780 - RNA, 21 nt, Artificial Sequence
  Synthetic
gccguccugaaggacaagaag

SEQ ID NO: 15781 - RNA, 22 nt, Artificial Sequence
  Synthetic
agccguccugaaggacaagaag

SEQ ID NO: 15782 - RNA, 23 nt, Artificial Sequence
  Synthetic
aagccguccugaaggacaagaag

SEQ ID NO: 15783 - RNA, 24 nt, Artificial Sequence
  Synthetic
gaagccguccugaaggacaagaag

SEQ ID NO: 15784 - RNA, 18 nt, Artificial Sequence
  Synthetic
cugcgccuggccgaccag

SEQ ID NO: 15785 - RNA, 19 nt, Artificial Sequence
  Synthetic
gcugcgccuggccgaccag

SEQ ID NO: 15786 - RNA, 21 nt, Artificial Sequence
  Synthetic
cugcugcgccuggccgaccag

SEQ ID NO: 15787 - RNA, 22 nt, Artificial Sequence
  Synthetic
ccugcugcgccuggccgaccag

SEQ ID NO: 15788 - RNA, 23 nt, Artificial Sequence
  Synthetic
gccugcugcgccuggccgaccag

SEQ ID NO: 15789 - RNA, 24 nt, Artificial Sequence
  Synthetic
ugccugcugcgccuggccgaccag

SEQ ID NO: 15790 - RNA, 18 nt, Artificial Sequence
  Synthetic
aggacgaggagcggccag

SEQ ID NO: 15791 - RNA, 19 nt, Artificial Sequence
  Synthetic
gaggacgaggagcggccag

SEQ ID NO: 15792 - RNA, 21 nt, Artificial Sequence
  Synthetic
gggaggacgaggagcggccag

SEQ ID NO: 15793 - RNA, 22 nt, Artificial Sequence
  Synthetic
cgggaggacgaggagcggccag

SEQ ID NO: 15794 - RNA, 23 nt, Artificial Sequence
  Synthetic
ccgggaggacgaggagcggccag

SEQ ID NO: 15795 - RNA, 24 nt, Artificial Sequence
  Synthetic
cccgggaggacgaggagcggccag

SEQ ID NO: 15796 - RNA, 18 nt, Artificial Sequence
  Synthetic
gacgaggagcggccagag

SEQ ID NO: 15797 - RNA, 19 nt, Artificial Sequence
  Synthetic
ggacgaggagcggccagag

SEQ ID NO: 15798 - RNA, 21 nt, Artificial Sequence
  Synthetic
gaggacgaggagcggccagag

SEQ ID NO: 15799 - RNA, 22 nt, Artificial Sequence
  Synthetic
ggaggacgaggagcggccagag

SEQ ID NO: 15800 - RNA, 23 nt, Artificial Sequence
  Synthetic
gggaggacgaggagcggccagag

SEQ ID NO: 15801 - RNA, 24 nt, Artificial Sequence
  Synthetic
cgggaggacgaggagcggccagag

SEQ ID NO: 15802 - RNA, 18 nt, Artificial Sequence
  Synthetic
gacgaggacgaacgcgag

SEQ ID NO: 15803 - RNA, 19 nt, Artificial Sequence
  Synthetic
ggacgaggacgaacgcgag

SEQ ID NO: 15804 - RNA, 21 nt, Artificial Sequence
  Synthetic
gaggacgaggacgaacgcgag

SEQ ID NO: 15805 - RNA, 22 nt, Artificial Sequence
  Synthetic
ggaggacgaggacgaacgcgag

SEQ ID NO: 15806 - RNA, 23 nt, Artificial Sequence
  Synthetic
gggaggacgaggacgaacgcgag

SEQ ID NO: 15807 - RNA, 24 nt, Artificial Sequence
  Synthetic
ggggaggacgaggacgaacgcgag

SEQ ID NO: 15808 - RNA, 18 nt, Artificial Sequence
  Synthetic
gaggagggcgggggcgag

SEQ ID NO: 15809 - RNA, 19 nt, Artificial Sequence
  Synthetic
cgaggagggcgggggcgag

SEQ ID NO: 15810 - RNA, 21 nt, Artificial Sequence
  Synthetic
cgcgaggagggcgggggcgag

SEQ ID NO: 15811 - RNA, 22 nt, Artificial Sequence
  Synthetic
acgcgaggagggcgggggcgag

SEQ ID NO: 15812 - RNA, 23 nt, Artificial Sequence
  Synthetic
aacgcgaggagggcgggggcgag

SEQ ID NO: 15813 - RNA, 24 nt, Artificial Sequence
  Synthetic
gaacgcgaggagggcgggggcgag

SEQ ID NO: 15814 - RNA, 18 nt, Artificial Sequence
  Synthetic
gacaaccuggccaucgag

SEQ ID NO: 15815 - RNA, 19 nt, Artificial Sequence
  Synthetic
ggacaaccuggccaucgag

SEQ ID NO: 15816 - RNA, 21 nt, Artificial Sequence
  Synthetic
gcggacaaccuggccaucgag

SEQ ID NO: 15817 - RNA, 22 nt, Artificial Sequence
  Synthetic
ggcggacaaccuggccaucgag

SEQ ID NO: 15818 - RNA, 23 nt, Artificial Sequence
  Synthetic
cggcggacaaccuggccaucgag

SEQ ID NO: 15819 - RNA, 24 nt, Artificial Sequence
  Synthetic
acggcggacaaccuggccaucgag

SEQ ID NO: 15820 - RNA, 18 nt, Artificial Sequence
  Synthetic
gacuaccuggagaucgag

SEQ ID NO: 15821 - RNA, 19 nt, Artificial Sequence
  Synthetic
ggacuaccuggagaucgag

SEQ ID NO: 15822 - RNA, 21 nt, Artificial Sequence
  Synthetic
aaggacuaccuggagaucgag

SEQ ID NO: 15823 - RNA, 22 nt, Artificial Sequence
  Synthetic
caaggacuaccuggagaucgag

SEQ ID NO: 15824 - RNA, 23 nt, Artificial Sequence
  Synthetic
gcaaggacuaccuggagaucgag

SEQ ID NO: 15825 - RNA, 24 nt, Artificial Sequence
  Synthetic
ggcaaggacuaccuggagaucgag

SEQ ID NO: 15826 - RNA, 18 nt, Artificial Sequence
  Synthetic
uccgcggaccacuucgag

SEQ ID NO: 15827 - RNA, 19 nt, Artificial Sequence
  Synthetic
cuccgcggaccacuucgag

SEQ ID NO: 15828 - RNA, 21 nt, Artificial Sequence
  Synthetic
aucuccgcggaccacuucgag

SEQ ID NO: 15829 - RNA, 22 nt, Artificial Sequence
  Synthetic
caucuccgcggaccacuucgag

SEQ ID NO: 15830 - RNA, 23 nt, Artificial Sequence
  Synthetic
gcaucuccgcggaccacuucgag

SEQ ID NO: 15831 - RNA, 24 nt, Artificial Sequence
  Synthetic
ggcaucuccgcggaccacuucgag

SEQ ID NO: 15832 - RNA, 18 nt, Artificial Sequence
  Synthetic
gaggagcggccagaggag

SEQ ID NO: 15833 - RNA, 19 nt, Artificial Sequence
  Synthetic
cgaggagcggccagaggag

SEQ ID NO: 15834 - RNA, 21 nt, Artificial Sequence
  Synthetic
gacgaggagcggccagaggag

SEQ ID NO: 15835 - RNA, 22 nt, Artificial Sequence
  Synthetic
ggacgaggagcggccagaggag

SEQ ID NO: 15836 - RNA, 23 nt, Artificial Sequence
  Synthetic
aggacgaggagcggccagaggag

SEQ ID NO: 15837 - RNA, 24 nt, Artificial Sequence
  Synthetic
gaggacgaggagcggccagaggag

SEQ ID NO: 15838 - RNA, 18 nt, Artificial Sequence
  Synthetic
gagcggccagaggaggag

SEQ ID NO: 15839 - RNA, 19 nt, Artificial Sequence
  Synthetic
ggagcggccagaggaggag

SEQ ID NO: 15840 - RNA, 21 nt, Artificial Sequence
  Synthetic
gaggagcggccagaggaggag

SEQ ID NO: 15841 - RNA, 22 nt, Artificial Sequence
  Synthetic
cgaggagcggccagaggaggag

SEQ ID NO: 15842 - RNA, 23 nt, Artificial Sequence
  Synthetic
acgaggagcggccagaggaggag

SEQ ID NO: 15843 - RNA, 24 nt, Artificial Sequence
  Synthetic
gacgaggagcggccagaggaggag

SEQ ID NO: 15844 - RNA, 18 nt, Artificial Sequence
  Synthetic
cgcaucaccgacccggag

SEQ ID NO: 15845 - RNA, 19 nt, Artificial Sequence
  Synthetic
gcgcaucaccgacccggag

SEQ ID NO: 15846 - RNA, 21 nt, Artificial Sequence
  Synthetic
cggcgcaucaccgacccggag

SEQ ID NO: 15847 - RNA, 22 nt, Artificial Sequence
  Synthetic
ucggcgcaucaccgacccggag

SEQ ID NO: 15848 - RNA, 23 nt, Artificial Sequence
  Synthetic
aucggcgcaucaccgacccggag

SEQ ID NO: 15849 - RNA, 24 nt, Artificial Sequence
  Synthetic
caucggcgcaucaccgacccggag

SEQ ID NO: 15850 - RNA, 18 nt, Artificial Sequence
  Synthetic
ggcgggggcgagcgggag

SEQ ID NO: 15851 - RNA, 19 nt, Artificial Sequence
  Synthetic
gggcgggggcgagcgggag

SEQ ID NO: 15852 - RNA, 21 nt, Artificial Sequence
  Synthetic
gagggcgggggcgagcgggag

SEQ ID NO: 15853 - RNA, 22 nt, Artificial Sequence
  Synthetic
ggagggcgggggcgagcgggag

SEQ ID NO: 15854 - RNA, 23 nt, Artificial Sequence
  Synthetic
aggagggcgggggcgagcgggag

SEQ ID NO: 15855 - RNA, 24 nt, Artificial Sequence
  Synthetic
gaggagggcgggggcgagcgggag

SEQ ID NO: 15856 - RNA, 18 nt, Artificial Sequence
  Synthetic
gcaguggcgcaccuggag

SEQ ID NO: 15857 - RNA, 19 nt, Artificial Sequence
  Synthetic
cgcaguggcgcaccuggag

SEQ ID NO: 15858 - RNA, 21 nt, Artificial Sequence
  Synthetic
gacgcaguggcgcaccuggag

SEQ ID NO: 15859 - RNA, 22 nt, Artificial Sequence
  Synthetic
cgacgcaguggcgcaccuggag

SEQ ID NO: 15860 - RNA, 23 nt, Artificial Sequence
  Synthetic
ccgacgcaguggcgcaccuggag

SEQ ID NO: 15861 - RNA, 24 nt, Artificial Sequence
  Synthetic
gccgacgcaguggcgcaccuggag

SEQ ID NO: 15862 - RNA, 18 nt, Artificial Sequence
  Synthetic
cccagacccgcgagguag

SEQ ID NO: 15863 - RNA, 19 nt, Artificial Sequence
  Synthetic
gcccagacccgcgagguag

SEQ ID NO: 15864 - RNA, 21 nt, Artificial Sequence
  Synthetic
uggcccagacccgcgagguag

SEQ ID NO: 15865 - RNA, 22 nt, Artificial Sequence
  Synthetic
guggcccagacccgcgagguag

SEQ ID NO: 15866 - RNA, 23 nt, Artificial Sequence
  Synthetic
cguggcccagacccgcgagguag

SEQ ID NO: 15867 - RNA, 24 nt, Artificial Sequence
  Synthetic
ucguggcccagacccgcgagguag

SEQ ID NO: 15868 - RNA, 18 nt, Artificial Sequence
  Synthetic
gagcggccgccgcguuag

SEQ ID NO: 15869 - RNA, 19 nt, Artificial Sequence
  Synthetic
ggagcggccgccgcguuag

SEQ ID NO: 15870 - RNA, 21 nt, Artificial Sequence
  Synthetic
ccggagcggccgccgcguuag

SEQ ID NO: 15871 - RNA, 22 nt, Artificial Sequence
  Synthetic
uccggagcggccgccgcguuag

SEQ ID NO: 15872 - RNA, 23 nt, Artificial Sequence
  Synthetic
cuccggagcggccgccgcguuag

SEQ ID NO: 15873 - RNA, 24 nt, Artificial Sequence
  Synthetic
ucuccggagcggccgccgcguuag

SEQ ID NO: 15874 - RNA, 18 nt, Artificial Sequence
  Synthetic
ccgcagcccgggaggacg

SEQ ID NO: 15875 - RNA, 19 nt, Artificial Sequence
  Synthetic
gccgcagcccgggaggacg

SEQ ID NO: 15876 - RNA, 21 nt, Artificial Sequence
  Synthetic
cggccgcagcccgggaggacg

SEQ ID NO: 15877 - RNA, 22 nt, Artificial Sequence
  Synthetic
ccggccgcagcccgggaggacg

SEQ ID NO: 15878 - RNA, 23 nt, Artificial Sequence
  Synthetic
uccggccgcagcccgggaggacg

SEQ ID NO: 15879 - RNA, 24 nt, Artificial Sequence
  Synthetic
guccggccgcagcccgggaggacg

SEQ ID NO: 15880 - RNA, 18 nt, Artificial Sequence
  Synthetic
gugggugccggcgcuacg

SEQ ID NO: 15881 - RNA, 19 nt, Artificial Sequence
  Synthetic
ggugggugccggcgcuacg

SEQ ID NO: 15882 - RNA, 21 nt, Artificial Sequence
  Synthetic
gcggugggugccggcgcuacg

SEQ ID NO: 15883 - RNA, 22 nt, Artificial Sequence
  Synthetic
ggcggugggugccggcgcuacg

SEQ ID NO: 15884 - RNA, 23 nt, Artificial Sequence
  Synthetic
gggcggugggugccggcgcuacg

SEQ ID NO: 15885 - RNA, 24 nt, Artificial Sequence
  Synthetic
ggggcggugggugccggcgcuacg

SEQ ID NO: 15886 - RNA, 18 nt, Artificial Sequence
  Synthetic
gucgaguuuaacuguacg

SEQ ID NO: 15887 - RNA, 19 nt, Artificial Sequence
  Synthetic
cgucgaguuuaacuguacg

SEQ ID NO: 15888 - RNA, 21 nt, Artificial Sequence
  Synthetic
gacgucgaguuuaacuguacg

SEQ ID NO: 15889 - RNA, 22 nt, Artificial Sequence
  Synthetic
cgacgucgaguuuaacuguacg

SEQ ID NO: 15890 - RNA, 23 nt, Artificial Sequence
  Synthetic
gcgacgucgaguuuaacuguacg

SEQ ID NO: 15891 - RNA, 24 nt, Artificial Sequence
  Synthetic
agcgacgucgaguuuaacuguacg

SEQ ID NO: 15892 - RNA, 18 nt, Artificial Sequence
  Synthetic
auggacgccaucacaccg

SEQ ID NO: 15893 - RNA, 19 nt, Artificial Sequence
  Synthetic
uauggacgccaucacaccg

SEQ ID NO: 15894 - RNA, 21 nt, Artificial Sequence
  Synthetic
uuuauggacgccaucacaccg

SEQ ID NO: 15895 - RNA, 22 nt, Artificial Sequence
  Synthetic
guuuauggacgccaucacaccg

SEQ ID NO: 15896 - RNA, 23 nt, Artificial Sequence
  Synthetic
gguuuauggacgccaucacaccg

SEQ ID NO: 15897 - RNA, 24 nt, Artificial Sequence
  Synthetic
cgguuuauggacgccaucacaccg

SEQ ID NO: 15898 - RNA, 18 nt, Artificial Sequence
  Synthetic
aggacuuuguccucaccg

SEQ ID NO: 15899 - RNA, 19 nt, Artificial Sequence
  Synthetic
caggacuuuguccucaccg

SEQ ID NO: 15900 - RNA, 21 nt, Artificial Sequence
  Synthetic
uccaggacuuuguccucaccg

SEQ ID NO: 15901 - RNA, 22 nt, Artificial Sequence
  Synthetic
auccaggacuuuguccucaccg

SEQ ID NO: 15902 - RNA, 23 nt, Artificial Sequence
  Synthetic
cauccaggacuuuguccucaccg

SEQ ID NO: 15903 - RNA, 24 nt, Artificial Sequence
  Synthetic
acauccaggacuuuguccucaccg

SEQ ID NO: 15904 - RNA, 18 nt, Artificial Sequence
  Synthetic
ccgguggccgggcacccg

SEQ ID NO: 15905 - RNA, 19 nt, Artificial Sequence
  Synthetic
uccgguggccgggcacccg

SEQ ID NO: 15906 - RNA, 21 nt, Artificial Sequence
  Synthetic
uuuccgguggccgggcacccg

SEQ ID NO: 15907 - RNA, 22 nt, Artificial Sequence
  Synthetic
cuuuccgguggccgggcacccg

SEQ ID NO: 15908 - RNA, 23 nt, Artificial Sequence
  Synthetic
ccuuuccgguggccgggcacccg

SEQ ID NO: 15909 - RNA, 24 nt, Artificial Sequence
  Synthetic
gccuuuccgguggccgggcacccg

SEQ ID NO: 15910 - RNA, 18 nt, Artificial Sequence
  Synthetic
cggcgcaucaccgacccg

SEQ ID NO: 15911 - RNA, 19 nt, Artificial Sequence
  Synthetic
ucggcgcaucaccgacccg

SEQ ID NO: 15912 - RNA, 21 nt, Artificial Sequence
  Synthetic
caucggcgcaucaccgacccg

SEQ ID NO: 15913 - RNA, 22 nt, Artificial Sequence
  Synthetic
ccaucggcgcaucaccgacccg

SEQ ID NO: 15914 - RNA, 23 nt, Artificial Sequence
  Synthetic
cccaucggcgcaucaccgacccg

SEQ ID NO: 15915 - RNA, 24 nt, Artificial Sequence
  Synthetic
gcccaucggcgcaucaccgacccg

SEQ ID NO: 15916 - RNA, 18 nt, Artificial Sequence
  Synthetic
uuccccagagcagccccg

SEQ ID NO: 15917 - RNA, 19 nt, Artificial Sequence
  Synthetic
auuccccagagcagccccg

SEQ ID NO: 15918 - RNA, 21 nt, Artificial Sequence
  Synthetic
ggauuccccagagcagccccg

SEQ ID NO: 15919 - RNA, 22 nt, Artificial Sequence
  Synthetic
cggauuccccagagcagccccg

SEQ ID NO: 15920 - RNA, 23 nt, Artificial Sequence
  Synthetic
gcggauuccccagagcagccccg

SEQ ID NO: 15921 - RNA, 24 nt, Artificial Sequence
  Synthetic
cgcggauuccccagagcagccccg

SEQ ID NO: 15922 - RNA, 18 nt, Artificial Sequence
  Synthetic
cguuagccgagcgccccg

SEQ ID NO: 15923 - RNA, 19 nt, Artificial Sequence
  Synthetic
gcguuagccgagcgccccg

SEQ ID NO: 15924 - RNA, 21 nt, Artificial Sequence
  Synthetic
ccgcguuagccgagcgccccg

SEQ ID NO: 15925 - RNA, 22 nt, Artificial Sequence
  Synthetic
gccgcguuagccgagcgccccg

SEQ ID NO: 15926 - RNA, 23 nt, Artificial Sequence
  Synthetic
cgccgcguuagccgagcgccccg

SEQ ID NO: 15927 - RNA, 24 nt, Artificial Sequence
  Synthetic
ccgccgcguuagccgagcgccccg

SEQ ID NO: 15928 - RNA, 18 nt, Artificial Sequence
  Synthetic
uggcgcgaccccugcccg

SEQ ID NO: 15929 - RNA, 19 nt, Artificial Sequence
  Synthetic
cuggcgcgaccccugcccg

SEQ ID NO: 15930 - RNA, 21 nt, Artificial Sequence
  Synthetic
ggcuggcgcgaccccugcccg

SEQ ID NO: 15931 - RNA, 22 nt, Artificial Sequence
  Synthetic
uggcuggcgcgaccccugcccg

SEQ ID NO: 15932 - RNA, 23 nt, Artificial Sequence
  Synthetic
guggcuggcgcgaccccugcccg

SEQ ID NO: 15933 - RNA, 24 nt, Artificial Sequence
  Synthetic
aguggcuggcgcgaccccugcccg

SEQ ID NO: 15934 - RNA, 18 nt, Artificial Sequence
  Synthetic
gggggcgagcgggagccg

SEQ ID NO: 15935 - RNA, 19 nt, Artificial Sequence
  Synthetic
cgggggcgagcgggagccg

SEQ ID NO: 15936 - RNA, 21 nt, Artificial Sequence
  Synthetic
ggcgggggcgagcgggagccg

SEQ ID NO: 15937 - RNA, 22 nt, Artificial Sequence
  Synthetic
gggcgggggcgagcgggagccg

SEQ ID NO: 15938 - RNA, 23 nt, Artificial Sequence
  Synthetic
agggcgggggcgagcgggagccg

SEQ ID NO: 15939 - RNA, 24 nt, Artificial Sequence
  Synthetic
gagggcgggggcgagcgggagccg

SEQ ID NO: 15940 - RNA, 18 nt, Artificial Sequence
  Synthetic
uccccgccuacuacgccg

SEQ ID NO: 15941 - RNA, 19 nt, Artificial Sequence
  Synthetic
auccccgccuacuacgccg

SEQ ID NO: 15942 - RNA, 21 nt, Artificial Sequence
  Synthetic
acauccccgccuacuacgccg

SEQ ID NO: 15943 - RNA, 22 nt, Artificial Sequence
  Synthetic
gacauccccgccuacuacgccg

SEQ ID NO: 15944 - RNA, 23 nt, Artificial Sequence
  Synthetic
cgacauccccgccuacuacgccg

SEQ ID NO: 15945 - RNA, 24 nt, Artificial Sequence
  Synthetic
gcgacauccccgccuacuacgccg

SEQ ID NO: 15946 - RNA, 18 nt, Artificial Sequence
  Synthetic
ggcgauuuaggggcgccg

SEQ ID NO: 15947 - RNA, 19 nt, Artificial Sequence
  Synthetic
gggcgauuuaggggcgccg

SEQ ID NO: 15948 - RNA, 21 nt, Artificial Sequence
  Synthetic
aggggcgauuuaggggcgccg

SEQ ID NO: 15949 - RNA, 22 nt, Artificial Sequence
  Synthetic
caggggcgauuuaggggcgccg

SEQ ID NO: 15950 - RNA, 23 nt, Artificial Sequence
  Synthetic
ccaggggcgauuuaggggcgccg

SEQ ID NO: 15951 - RNA, 24 nt, Artificial Sequence
  Synthetic
cccaggggcgauuuaggggcgccg

SEQ ID NO: 15952 - RNA, 18 nt, Artificial Sequence
  Synthetic
gccgcggccucacggccg

SEQ ID NO: 15953 - RNA, 19 nt, Artificial Sequence
  Synthetic
ugccgcggccucacggccg

SEQ ID NO: 15954 - RNA, 21 nt, Artificial Sequence
  Synthetic
ugugccgcggccucacggccg

SEQ ID NO: 15955 - RNA, 22 nt, Artificial Sequence
  Synthetic
cugugccgcggccucacggccg

SEQ ID NO: 15956 - RNA, 23 nt, Artificial Sequence
  Synthetic
gcugugccgcggccucacggccg

SEQ ID NO: 15957 - RNA, 24 nt, Artificial Sequence
  Synthetic
ugcugugccgcggccucacggccg

SEQ ID NO: 15958 - RNA, 18 nt, Artificial Sequence
  Synthetic
aggacgaggacgaacgcg

SEQ ID NO: 15959 - RNA, 19 nt, Artificial Sequence
  Synthetic
gaggacgaggacgaacgcg

SEQ ID NO: 15960 - RNA, 21 nt, Artificial Sequence
  Synthetic
gggaggacgaggacgaacgcg

SEQ ID NO: 15961 - RNA, 22 nt, Artificial Sequence
  Synthetic
ggggaggacgaggacgaacgcg

SEQ ID NO: 15962 - RNA, 23 nt, Artificial Sequence
  Synthetic
gggggaggacgaggacgaacgcg

SEQ ID NO: 15963 - RNA, 24 nt, Artificial Sequence
  Synthetic
agggggaggacgaggacgaacgcg

SEQ ID NO: 15964 - RNA, 18 nt, Artificial Sequence
  Synthetic
uuagccgagcgccccgcg

SEQ ID NO: 15965 - RNA, 19 nt, Artificial Sequence
  Synthetic
guuagccgagcgccccgcg

SEQ ID NO: 15966 - RNA, 21 nt, Artificial Sequence
  Synthetic
gcguuagccgagcgccccgcg

SEQ ID NO: 15967 - RNA, 22 nt, Artificial Sequence
  Synthetic
cgcguuagccgagcgccccgcg

SEQ ID NO: 15968 - RNA, 23 nt, Artificial Sequence
  Synthetic
ccgcguuagccgagcgccccgcg

SEQ ID NO: 15969 - RNA, 24 nt, Artificial Sequence
  Synthetic
gccgcguuagccgagcgccccgcg

SEQ ID NO: 15970 - RNA, 18 nt, Artificial Sequence
  Synthetic
cgaguacguccacgcgcg

SEQ ID NO: 15971 - RNA, 19 nt, Artificial Sequence
  Synthetic
gcgaguacguccacgcgcg

SEQ ID NO: 15972 - RNA, 21 nt, Artificial Sequence
  Synthetic
ccgcgaguacguccacgcgcg

SEQ ID NO: 15973 - RNA, 22 nt, Artificial Sequence
  Synthetic
cccgcgaguacguccacgcgcg

SEQ ID NO: 15974 - RNA, 23 nt, Artificial Sequence
  Synthetic
acccgcgaguacguccacgcgcg

SEQ ID NO: 15975 - RNA, 24 nt, Artificial Sequence
  Synthetic
gacccgcgaguacguccacgcgcg

SEQ ID NO: 15976 - RNA, 18 nt, Artificial Sequence
  Synthetic
cgggagccggagggcgcg

SEQ ID NO: 15977 - RNA, 19 nt, Artificial Sequence
  Synthetic
gcgggagccggagggcgcg

SEQ ID NO: 15978 - RNA, 21 nt, Artificial Sequence
  Synthetic
gagcgggagccggagggcgcg

SEQ ID NO: 15979 - RNA, 22 nt, Artificial Sequence
  Synthetic
cgagcgggagccggagggcgcg

SEQ ID NO: 15980 - RNA, 23 nt, Artificial Sequence
  Synthetic
gcgagcgggagccggagggcgcg

SEQ ID NO: 15981 - RNA, 24 nt, Artificial Sequence
  Synthetic
ggcgagcgggagccggagggcgcg

SEQ ID NO: 15982 - RNA, 18 nt, Artificial Sequence
  Synthetic
gauaucgaaugcaaggcg

SEQ ID NO: 15983 - RNA, 19 nt, Artificial Sequence
  Synthetic
cgauaucgaaugcaaggcg

SEQ ID NO: 15984 - RNA, 21 nt, Artificial Sequence
  Synthetic
uucgauaucgaaugcaaggcg

SEQ ID NO: 15985 - RNA, 22 nt, Artificial Sequence
  Synthetic
cuucgauaucgaaugcaaggcg

SEQ ID NO: 15986 - RNA, 23 nt, Artificial Sequence
  Synthetic
gcuucgauaucgaaugcaaggcg

SEQ ID NO: 15987 - RNA, 24 nt, Artificial Sequence
  Synthetic
ugcuucgauaucgaaugcaaggcg

SEQ ID NO: 15988 - RNA, 18 nt, Artificial Sequence
  Synthetic
ggugccggcgcuacggcg

SEQ ID NO: 15989 - RNA, 19 nt, Artificial Sequence
  Synthetic
gggugccggcgcuacggcg

SEQ ID NO: 15990 - RNA, 21 nt, Artificial Sequence
  Synthetic
gugggugccggcgcuacggcg

SEQ ID NO: 15991 - RNA, 22 nt, Artificial Sequence
  Synthetic
ggugggugccggcgcuacggcg

SEQ ID NO: 15992 - RNA, 23 nt, Artificial Sequence
  Synthetic
cggugggugccggcgcuacggcg

SEQ ID NO: 15993 - RNA, 24 nt, Artificial Sequence
  Synthetic
gcggugggugccggcgcuacggcg

SEQ ID NO: 15994 - RNA, 18 nt, Artificial Sequence
  Synthetic
aggggcgauuuaggggcg

SEQ ID NO: 15995 - RNA, 19 nt, Artificial Sequence
  Synthetic
caggggcgauuuaggggcg

SEQ ID NO: 15996 - RNA, 21 nt, Artificial Sequence
  Synthetic
cccaggggcgauuuaggggcg

SEQ ID NO: 15997 - RNA, 22 nt, Artificial Sequence
  Synthetic
acccaggggcgauuuaggggcg

SEQ ID NO: 15998 - RNA, 23 nt, Artificial Sequence
  Synthetic
cacccaggggcgauuuaggggcg

SEQ ID NO: 15999 - RNA, 24 nt, Artificial Sequence
  Synthetic
acacccaggggcgauuuaggggcg

SEQ ID NO: 16000 - RNA, 18 nt, Artificial Sequence
  Synthetic
cggacaaccuggccaucg

SEQ ID NO: 16001 - RNA, 19 nt, Artificial Sequence
  Synthetic
gcggacaaccuggccaucg

SEQ ID NO: 16002 - RNA, 21 nt, Artificial Sequence
  Synthetic
cggcggacaaccuggccaucg

SEQ ID NO: 16003 - RNA, 22 nt, Artificial Sequence
  Synthetic
acggcggacaaccuggccaucg

SEQ ID NO: 16004 - RNA, 23 nt, Artificial Sequence
  Synthetic
uacggcggacaaccuggccaucg

SEQ ID NO: 16005 - RNA, 24 nt, Artificial Sequence
  Synthetic
guacggcggacaaccuggccaucg

SEQ ID NO: 16006 - RNA, 18 nt, Artificial Sequence
  Synthetic
acuuuuacaugaacaagg

SEQ ID NO: 16007 - RNA, 19 nt, Artificial Sequence
  Synthetic
uacuuuuacaugaacaagg

SEQ ID NO: 16008 - RNA, 21 nt, Artificial Sequence
  Synthetic
aguacuuuuacaugaacaagg

SEQ ID NO: 16009 - RNA, 22 nt, Artificial Sequence
  Synthetic
caguacuuuuacaugaacaagg

SEQ ID NO: 16010 - RNA, 23 nt, Artificial Sequence
  Synthetic
gcaguacuuuuacaugaacaagg

SEQ ID NO: 16011 - RNA, 24 nt, Artificial Sequence
  Synthetic
ggcaguacuuuuacaugaacaagg

SEQ ID NO: 16012 - RNA, 18 nt, Artificial Sequence
  Synthetic
ucgauaucgaaugcaagg

SEQ ID NO: 16013 - RNA, 19 nt, Artificial Sequence
  Synthetic
uucgauaucgaaugcaagg

SEQ ID NO: 16014 - RNA, 21 nt, Artificial Sequence
  Synthetic
gcuucgauaucgaaugcaagg

SEQ ID NO: 16015 - RNA, 22 nt, Artificial Sequence
  Synthetic
ugcuucgauaucgaaugcaagg

SEQ ID NO: 16016 - RNA, 23 nt, Artificial Sequence
  Synthetic
gugcuucgauaucgaaugcaagg

SEQ ID NO: 16017 - RNA, 24 nt, Artificial Sequence
  Synthetic
ugugcuucgauaucgaaugcaagg

SEQ ID NO: 16018 - RNA, 18 nt, Artificial Sequence
  Synthetic
acgaggagcggccagagg

SEQ ID NO: 16019 - RNA, 19 nt, Artificial Sequence
  Synthetic
gacgaggagcggccagagg

SEQ ID NO: 16020 - RNA, 21 nt, Artificial Sequence
  Synthetic
aggacgaggagcggccagagg

SEQ ID NO: 16021 - RNA, 22 nt, Artificial Sequence
  Synthetic
gaggacgaggagcggccagagg

SEQ ID NO: 16022 - RNA, 23 nt, Artificial Sequence
  Synthetic
ggaggacgaggagcggccagagg

SEQ ID NO: 16023 - RNA, 24 nt, Artificial Sequence
  Synthetic
gggaggacgaggagcggccagagg

SEQ ID NO: 16024 - RNA, 18 nt, Artificial Sequence
  Synthetic
aggagggggaggacgagg

SEQ ID NO: 16025 - RNA, 19 nt, Artificial Sequence
  Synthetic
gaggagggggaggacgagg

SEQ ID NO: 16026 - RNA, 21 nt, Artificial Sequence
  Synthetic
aggaggagggggaggacgagg

SEQ ID NO: 16027 - RNA, 22 nt, Artificial Sequence
  Synthetic
gaggaggagggggaggacgagg

SEQ ID NO: 16028 - RNA, 23 nt, Artificial Sequence
  Synthetic
agaggaggagggggaggacgagg

SEQ ID NO: 16029 - RNA, 24 nt, Artificial Sequence
  Synthetic
cagaggaggagggggaggacgagg

SEQ ID NO: 16030 - RNA, 18 nt, Artificial Sequence
  Synthetic
ccaucaagaaguacgagg

SEQ ID NO: 16031 - RNA, 19 nt, Artificial Sequence
  Synthetic
gccaucaagaaguacgagg

SEQ ID NO: 16032 - RNA, 21 nt, Artificial Sequence
  Synthetic
cggccaucaagaaguacgagg

SEQ ID NO: 16033 - RNA, 22 nt, Artificial Sequence
  Synthetic
ccggccaucaagaaguacgagg

SEQ ID NO: 16034 - RNA, 23 nt, Artificial Sequence
  Synthetic
cccggccaucaagaaguacgagg

SEQ ID NO: 16035 - RNA, 24 nt, Artificial Sequence
  Synthetic
gcccggccaucaagaaguacgagg

SEQ ID NO: 16036 - RNA, 18 nt, Artificial Sequence
  Synthetic
uggcccagacccgcgagg

SEQ ID NO: 16037 - RNA, 19 nt, Artificial Sequence
  Synthetic
guggcccagacccgcgagg

SEQ ID NO: 16038 - RNA, 21 nt, Artificial Sequence
  Synthetic
ucguggcccagacccgcgagg

SEQ ID NO: 16039 - RNA, 22 nt, Artificial Sequence
  Synthetic
aucguggcccagacccgcgagg

SEQ ID NO: 16040 - RNA, 23 nt, Artificial Sequence
  Synthetic
gaucguggcccagacccgcgagg

SEQ ID NO: 16041 - RNA, 24 nt, Artificial Sequence
  Synthetic
ugaucguggcccagacccgcgagg

SEQ ID NO: 16042 - RNA, 18 nt, Artificial Sequence
  Synthetic
acuaccuggagaucgagg

SEQ ID NO: 16043 - RNA, 19 nt, Artificial Sequence
  Synthetic
gacuaccuggagaucgagg

SEQ ID NO: 16044 - RNA, 21 nt, Artificial Sequence
  Synthetic
aggacuaccuggagaucgagg

SEQ ID NO: 16045 - RNA, 22 nt, Artificial Sequence
  Synthetic
aaggacuaccuggagaucgagg

SEQ ID NO: 16046 - RNA, 23 nt, Artificial Sequence
  Synthetic
caaggacuaccuggagaucgagg

SEQ ID NO: 16047 - RNA, 24 nt, Artificial Sequence
  Synthetic
gcaaggacuaccuggagaucgagg

SEQ ID NO: 16048 - RNA, 18 nt, Artificial Sequence
  Synthetic
ccgcggaccacuucgagg

SEQ ID NO: 16049 - RNA, 19 nt, Artificial Sequence
  Synthetic
uccgcggaccacuucgagg

SEQ ID NO: 16050 - RNA, 21 nt, Artificial Sequence
  Synthetic
ucuccgcggaccacuucgagg

SEQ ID NO: 16051 - RNA, 22 nt, Artificial Sequence
  Synthetic
aucuccgcggaccacuucgagg

SEQ ID NO: 16052 - RNA, 23 nt, Artificial Sequence
  Synthetic
caucuccgcggaccacuucgagg

SEQ ID NO: 16053 - RNA, 24 nt, Artificial Sequence
  Synthetic
gcaucuccgcggaccacuucgagg

SEQ ID NO: 16054 - RNA, 18 nt, Artificial Sequence
  Synthetic
aggagcggccagaggagg

SEQ ID NO: 16055 - RNA, 19 nt, Artificial Sequence
  Synthetic
gaggagcggccagaggagg

SEQ ID NO: 16056 - RNA, 21 nt, Artificial Sequence
  Synthetic
acgaggagcggccagaggagg

SEQ ID NO: 16057 - RNA, 22 nt, Artificial Sequence
  Synthetic
gacgaggagcggccagaggagg

SEQ ID NO: 16058 - RNA, 23 nt, Artificial Sequence
  Synthetic
ggacgaggagcggccagaggagg

SEQ ID NO: 16059 - RNA, 24 nt, Artificial Sequence
  Synthetic
aggacgaggagcggccagaggagg

SEQ ID NO: 16060 - RNA, 18 nt, Artificial Sequence
  Synthetic
aggacgaacgcgaggagg

SEQ ID NO: 16061 - RNA, 19 nt, Artificial Sequence
  Synthetic
gaggacgaacgcgaggagg

SEQ ID NO: 16062 - RNA, 21 nt, Artificial Sequence
  Synthetic
acgaggacgaacgcgaggagg

SEQ ID NO: 16063 - RNA, 22 nt, Artificial Sequence
  Synthetic
gacgaggacgaacgcgaggagg

SEQ ID NO: 16064 - RNA, 23 nt, Artificial Sequence
  Synthetic
ggacgaggacgaacgcgaggagg

SEQ ID NO: 16065 - RNA, 24 nt, Artificial Sequence
  Synthetic
aggacgaggacgaacgcgaggagg

SEQ ID NO: 16066 - RNA, 18 nt, Artificial Sequence
  Synthetic
agcggccagaggaggagg

SEQ ID NO: 16067 - RNA, 19 nt, Artificial Sequence
  Synthetic
gagcggccagaggaggagg

SEQ ID NO: 16068 - RNA, 21 nt, Artificial Sequence
  Synthetic
aggagcggccagaggaggagg

SEQ ID NO: 16069 - RNA, 22 nt, Artificial Sequence
  Synthetic
gaggagcggccagaggaggagg

SEQ ID NO: 16070 - RNA, 23 nt, Artificial Sequence
  Synthetic
cgaggagcggccagaggaggagg

SEQ ID NO: 16071 - RNA, 24 nt, Artificial Sequence
  Synthetic
acgaggagcggccagaggaggagg

SEQ ID NO: 16072 - RNA, 18 nt, Artificial Sequence
  Synthetic
cggccgcagcccgggagg

SEQ ID NO: 16073 - RNA, 19 nt, Artificial Sequence
  Synthetic
ccggccgcagcccgggagg

SEQ ID NO: 16074 - RNA, 21 nt, Artificial Sequence
  Synthetic
guccggccgcagcccgggagg

SEQ ID NO: 16075 - RNA, 22 nt, Artificial Sequence
  Synthetic
cguccggccgcagcccgggagg

SEQ ID NO: 16076 - RNA, 23 nt, Artificial Sequence
  Synthetic
gcguccggccgcagcccgggagg

SEQ ID NO: 16077 - RNA, 24 nt, Artificial Sequence
  Synthetic
agcguccggccgcagcccgggagg

SEQ ID NO: 16078 - RNA, 18 nt, Artificial Sequence
  Synthetic
cagaggaggagggggagg

SEQ ID NO: 16079 - RNA, 19 nt, Artificial Sequence
  Synthetic
ccagaggaggagggggagg

SEQ ID NO: 16080 - RNA, 21 nt, Artificial Sequence
  Synthetic
ggccagaggaggagggggagg

SEQ ID NO: 16081 - RNA, 22 nt, Artificial Sequence
  Synthetic
cggccagaggaggagggggagg

SEQ ID NO: 16082 - RNA, 23 nt, Artificial Sequence
  Synthetic
gcggccagaggaggagggggagg

SEQ ID NO: 16083 - RNA, 24 nt, Artificial Sequence
  Synthetic
agcggccagaggaggagggggagg

SEQ ID NO: 16084 - RNA, 18 nt, Artificial Sequence
  Synthetic
gcaaggcggggggggagg

SEQ ID NO: 16085 - RNA, 19 nt, Artificial Sequence
  Synthetic
ugcaaggcggggggggagg

SEQ ID NO: 16086 - RNA, 21 nt, Artificial Sequence
  Synthetic
aaugcaaggcggggggggagg

SEQ ID NO: 16087 - RNA, 22 nt, Artificial Sequence
  Synthetic
gaaugcaaggcggggggggagg

SEQ ID NO: 16088 - RNA, 23 nt, Artificial Sequence
  Synthetic
cgaaugcaaggcggggggggagg

SEQ ID NO: 16089 - RNA, 24 nt, Artificial Sequence
  Synthetic
ucgaaugcaaggcggggggggagg

SEQ ID NO: 16090 - RNA, 18 nt, Artificial Sequence
  Synthetic
guacggccgcaugaacgg

SEQ ID NO: 16091 - RNA, 19 nt, Artificial Sequence
  Synthetic
gguacggccgcaugaacgg

SEQ ID NO: 16092 - RNA, 21 nt, Artificial Sequence
  Synthetic
cggguacggccgcaugaacgg

SEQ ID NO: 16093 - RNA, 22 nt, Artificial Sequence
  Synthetic
acggguacggccgcaugaacgg

SEQ ID NO: 16094 - RNA, 23 nt, Artificial Sequence
  Synthetic
gacggguacggccgcaugaacgg

SEQ ID NO: 16095 - RNA, 24 nt, Artificial Sequence
  Synthetic
ggacggguacggccgcaugaacgg

SEQ ID NO: 16096 - RNA, 18 nt, Artificial Sequence
  Synthetic
ugggugccggcgcuacgg

SEQ ID NO: 16097 - RNA, 19 nt, Artificial Sequence
  Synthetic
gugggugccggcgcuacgg

SEQ ID NO: 16098 - RNA, 21 nt, Artificial Sequence
  Synthetic
cggugggugccggcgcuacgg

SEQ ID NO: 16099 - RNA, 22 nt, Artificial Sequence
  Synthetic
gcggugggugccggcgcuacgg

SEQ ID NO: 16100 - RNA, 23 nt, Artificial Sequence
  Synthetic
ggcggugggugccggcgcuacgg

SEQ ID NO: 16101 - RNA, 24 nt, Artificial Sequence
  Synthetic
gggcggugggugccggcgcuacgg

SEQ ID NO: 16102 - RNA, 18 nt, Artificial Sequence
  Synthetic
cguccggccgcagcccgg

SEQ ID NO: 16103 - RNA, 19 nt, Artificial Sequence
  Synthetic
gcguccggccgcagcccgg

SEQ ID NO: 16104 - RNA, 21 nt, Artificial Sequence
  Synthetic
aagcguccggccgcagcccgg

SEQ ID NO: 16105 - RNA, 22 nt, Artificial Sequence
  Synthetic
caagcguccggccgcagcccgg

SEQ ID NO: 16106 - RNA, 23 nt, Artificial Sequence
  Synthetic
ccaagcguccggccgcagcccgg

SEQ ID NO: 16107 - RNA, 24 nt, Artificial Sequence
  Synthetic
cccaagcguccggccgcagcccgg

SEQ ID NO: 16108 - RNA, 18 nt, Artificial Sequence
  Synthetic
gcgauuuaggggcgccgg

SEQ ID NO: 16109 - RNA, 19 nt, Artificial Sequence
  Synthetic
ggcgauuuaggggcgccgg

SEQ ID NO: 16110 - RNA, 21 nt, Artificial Sequence
  Synthetic
ggggcgauuuaggggcgccgg

SEQ ID NO: 16111 - RNA, 22 nt, Artificial Sequence
  Synthetic
aggggcgauuuaggggcgccgg

SEQ ID NO: 16112 - RNA, 23 nt, Artificial Sequence
  Synthetic
caggggcgauuuaggggcgccgg

SEQ ID NO: 16113 - RNA, 24 nt, Artificial Sequence
  Synthetic
ccaggggcgauuuaggggcgccgg

SEQ ID NO: 16114 - RNA, 18 nt, Artificial Sequence
  Synthetic
auaucgaaugcaaggcgg

SEQ ID NO: 16115 - RNA, 19 nt, Artificial Sequence
  Synthetic
gauaucgaaugcaaggcgg

SEQ ID NO: 16116 - RNA, 21 nt, Artificial Sequence
  Synthetic
ucgauaucgaaugcaaggcgg

SEQ ID NO: 16117 - RNA, 22 nt, Artificial Sequence
  Synthetic
uucgauaucgaaugcaaggcgg

SEQ ID NO: 16118 - RNA, 23 nt, Artificial Sequence
  Synthetic
cuucgauaucgaaugcaaggcgg

SEQ ID NO: 16119 - RNA, 24 nt, Artificial Sequence
  Synthetic
gcuucgauaucgaaugcaaggcgg

SEQ ID NO: 16120 - RNA, 18 nt, Artificial Sequence
  Synthetic
gugccggcgcuacggcgg

SEQ ID NO: 16121 - RNA, 19 nt, Artificial Sequence
  Synthetic
ggugccggcgcuacggcgg

SEQ ID NO: 16122 - RNA, 21 nt, Artificial Sequence
  Synthetic
ugggugccggcgcuacggcgg

SEQ ID NO: 16123 - RNA, 22 nt, Artificial Sequence
  Synthetic
gugggugccggcgcuacggcgg

SEQ ID NO: 16124 - RNA, 23 nt, Artificial Sequence
  Synthetic
ggugggugccggcgcuacggcgg

SEQ ID NO: 16125 - RNA, 24 nt, Artificial Sequence
  Synthetic
cggugggugccggcgcuacggcgg

SEQ ID NO: 16126 - RNA, 18 nt, Artificial Sequence
  Synthetic
ggacgaacgcgaggaggg

SEQ ID NO: 16127 - RNA, 19 nt, Artificial Sequence
  Synthetic
aggacgaacgcgaggaggg

SEQ ID NO: 16128 - RNA, 21 nt, Artificial Sequence
  Synthetic
cgaggacgaacgcgaggaggg

SEQ ID NO: 16129 - RNA, 22 nt, Artificial Sequence
  Synthetic
acgaggacgaacgcgaggaggg

SEQ ID NO: 16130 - RNA, 23 nt, Artificial Sequence
  Synthetic
gacgaggacgaacgcgaggaggg

SEQ ID NO: 16131 - RNA, 24 nt, Artificial Sequence
  Synthetic
ggacgaggacgaacgcgaggaggg

SEQ ID NO: 16132 - RNA, 18 nt, Artificial Sequence
  Synthetic
guaccgucucaaaccggg

SEQ ID NO: 16133 - RNA, 19 nt, Artificial Sequence
  Synthetic
gguaccgucucaaaccggg

SEQ ID NO: 16134 - RNA, 21 nt, Artificial Sequence
  Synthetic
cugguaccgucucaaaccggg

SEQ ID NO: 16135 - RNA, 22 nt, Artificial Sequence
  Synthetic
gcugguaccgucucaaaccggg

SEQ ID NO: 16136 - RNA, 23 nt, Artificial Sequence
  Synthetic
ggcugguaccgucucaaaccggg

SEQ ID NO: 16137 - RNA, 24 nt, Artificial Sequence
  Synthetic
cggcugguaccgucucaaaccggg

SEQ ID NO: 16138 - RNA, 18 nt, Artificial Sequence
  Synthetic
cgauuuaggggcgccggg

SEQ ID NO: 16139 - RNA, 19 nt, Artificial Sequence
  Synthetic
gcgauuuaggggcgccggg

SEQ ID NO: 16140 - RNA, 21 nt, Artificial Sequence
  Synthetic
gggcgauuuaggggcgccggg

SEQ ID NO: 16141 - RNA, 22 nt, Artificial Sequence
  Synthetic
ggggcgauuuaggggcgccggg

SEQ ID NO: 16142 - RNA, 23 nt, Artificial Sequence
  Synthetic
aggggcgauuuaggggcgccggg

SEQ ID NO: 16143 - RNA, 24 nt, Artificial Sequence
  Synthetic
caggggcgauuuaggggcgccggg

SEQ ID NO: 16144 - RNA, 18 nt, Artificial Sequence
  Synthetic
uaucgaaugcaaggcggg

SEQ ID NO: 16145 - RNA, 19 nt, Artificial Sequence
  Synthetic
auaucgaaugcaaggcggg

SEQ ID NO: 16146 - RNA, 21 nt, Artificial Sequence
  Synthetic
cgauaucgaaugcaaggcggg

SEQ ID NO: 16147 - RNA, 22 nt, Artificial Sequence
  Synthetic
ucgauaucgaaugcaaggcggg

SEQ ID NO: 16148 - RNA, 23 nt, Artificial Sequence
  Synthetic
uucgauaucgaaugcaaggcggg

SEQ ID NO: 16149 - RNA, 24 nt, Artificial Sequence
  Synthetic
cuucgauaucgaaugcaaggcggg

SEQ ID NO: 16150 - RNA, 18 nt, Artificial Sequence
  Synthetic
acgccgccgccccagggg

SEQ ID NO: 16151 - RNA, 19 nt, Artificial Sequence
  Synthetic
gacgccgccgccccagggg

SEQ ID NO: 16152 - RNA, 21 nt, Artificial Sequence
  Synthetic
uagacgccgccgccccagggg

SEQ ID NO: 16153 - RNA, 22 nt, Artificial Sequence
  Synthetic
cuagacgccgccgccccagggg

SEQ ID NO: 16154 - RNA, 23 nt, Artificial Sequence
  Synthetic
gcuagacgccgccgccccagggg

SEQ ID NO: 16155 - RNA, 24 nt, Artificial Sequence
  Synthetic
agcuagacgccgccgccccagggg

SEQ ID NO: 16156 - RNA, 18 nt, Artificial Sequence
  Synthetic
cggccagaggaggagggg

SEQ ID NO: 16157 - RNA, 19 nt, Artificial Sequence
  Synthetic
gcggccagaggaggagggg

SEQ ID NO: 16158 - RNA, 21 nt, Artificial Sequence
  Synthetic
gagcggccagaggaggagggg

SEQ ID NO: 16159 - RNA, 22 nt, Artificial Sequence
  Synthetic
ggagcggccagaggaggagggg

SEQ ID NO: 16160 - RNA, 23 nt, Artificial Sequence
  Synthetic
aggagcggccagaggaggagggg

SEQ ID NO: 16161 - RNA, 24 nt, Artificial Sequence
  Synthetic
gaggagcggccagaggaggagggg

SEQ ID NO: 16162 - RNA, 18 nt, Artificial Sequence
  Synthetic
gauuuaggggcgccgggg

SEQ ID NO: 16163 - RNA, 19 nt, Artificial Sequence
  Synthetic
cgauuuaggggcgccgggg

SEQ ID NO: 16164 - RNA, 21 nt, Artificial Sequence
  Synthetic
ggcgauuuaggggcgccgggg

SEQ ID NO: 16165 - RNA, 22 nt, Artificial Sequence
  Synthetic
gggcgauuuaggggcgccgggg

SEQ ID NO: 16166 - RNA, 23 nt, Artificial Sequence
  Synthetic
ggggcgauuuaggggcgccgggg

SEQ ID NO: 16167 - RNA, 24 nt, Artificial Sequence
  Synthetic
aggggcgauuuaggggcgccgggg

SEQ ID NO: 16168 - RNA, 18 nt, Artificial Sequence
  Synthetic
aucgaaugcaaggcgggg

SEQ ID NO: 16169 - RNA, 19 nt, Artificial Sequence
  Synthetic
uaucgaaugcaaggcgggg

SEQ ID NO: 16170 - RNA, 21 nt, Artificial Sequence
  Synthetic
gauaucgaaugcaaggcgggg

SEQ ID NO: 16171 - RNA, 22 nt, Artificial Sequence
  Synthetic
cgauaucgaaugcaaggcgggg

SEQ ID NO: 16172 - RNA, 23 nt, Artificial Sequence
  Synthetic
ucgauaucgaaugcaaggcgggg

SEQ ID NO: 16173 - RNA, 24 nt, Artificial Sequence
  Synthetic
uucgauaucgaaugcaaggcgggg

SEQ ID NO: 16174 - RNA, 18 nt, Artificial Sequence
  Synthetic
aacgcgaggagggcgggg

SEQ ID NO: 16175 - RNA, 19 nt, Artificial Sequence
  Synthetic
gaacgcgaggagggcgggg

SEQ ID NO: 16176 - RNA, 21 nt, Artificial Sequence
  Synthetic
acgaacgcgaggagggcgggg

SEQ ID NO: 16177 - RNA, 22 nt, Artificial Sequence
  Synthetic
gacgaacgcgaggagggcgggg

SEQ ID NO: 16178 - RNA, 23 nt, Artificial Sequence
  Synthetic
ggacgaacgcgaggagggcgggg

SEQ ID NO: 16179 - RNA, 24 nt, Artificial Sequence
  Synthetic
aggacgaacgcgaggagggcgggg

SEQ ID NO: 16180 - RNA, 18 nt, Artificial Sequence
  Synthetic
ucgaaugcaaggcggggg

SEQ ID NO: 16181 - RNA, 19 nt, Artificial Sequence
  Synthetic
aucgaaugcaaggcggggg

SEQ ID NO: 16182 - RNA, 21 nt, Artificial Sequence
  Synthetic
auaucgaaugcaaggcggggg

SEQ ID NO: 16183 - RNA, 22 nt, Artificial Sequence
  Synthetic
gauaucgaaugcaaggcggggg

SEQ ID NO: 16184 - RNA, 23 nt, Artificial Sequence
  Synthetic
cgauaucgaaugcaaggcggggg

SEQ ID NO: 16185 - RNA, 24 nt, Artificial Sequence
  Synthetic
ucgauaucgaaugcaaggcggggg

SEQ ID NO: 16186 - RNA, 18 nt, Artificial Sequence
  Synthetic
gaaugcaaggcggggggg

SEQ ID NO: 16187 - RNA, 19 nt, Artificial Sequence
  Synthetic
cgaaugcaaggcggggggg

SEQ ID NO: 16188 - RNA, 21 nt, Artificial Sequence
  Synthetic
aucgaaugcaaggcggggggg

SEQ ID NO: 16189 - RNA, 22 nt, Artificial Sequence
  Synthetic
uaucgaaugcaaggcggggggg

SEQ ID NO: 16190 - RNA, 23 nt, Artificial Sequence
  Synthetic
auaucgaaugcaaggcggggggg

SEQ ID NO: 16191 - RNA, 24 nt, Artificial Sequence
  Synthetic
gauaucgaaugcaaggcggggggg

SEQ ID NO: 16192 - RNA, 18 nt, Artificial Sequence
  Synthetic
ugcugguguccgagcugg

SEQ ID NO: 16193 - RNA, 19 nt, Artificial Sequence
  Synthetic
cugcugguguccgagcugg

SEQ ID NO: 16194 - RNA, 21 nt, Artificial Sequence
  Synthetic
agcugcugguguccgagcugg

SEQ ID NO: 16195 - RNA, 22 nt, Artificial Sequence
  Synthetic
aagcugcugguguccgagcugg

SEQ ID NO: 16196 - RNA, 23 nt, Artificial Sequence
  Synthetic
caagcugcugguguccgagcugg

SEQ ID NO: 16197 - RNA, 24 nt, Artificial Sequence
  Synthetic
gcaagcugcugguguccgagcugg

SEQ ID NO: 16198 - RNA, 18 nt, Artificial Sequence
  Synthetic
acaagcucaacgccgugg

SEQ ID NO: 16199 - RNA, 19 nt, Artificial Sequence
  Synthetic
uacaagcucaacgccgugg

SEQ ID NO: 16200 - RNA, 21 nt, Artificial Sequence
  Synthetic
gcuacaagcucaacgccgugg

SEQ ID NO: 16201 - RNA, 22 nt, Artificial Sequence
  Synthetic
agcuacaagcucaacgccgugg

SEQ ID NO: 16202 - RNA, 23 nt, Artificial Sequence
  Synthetic
gagcuacaagcucaacgccgugg

SEQ ID NO: 16203 - RNA, 24 nt, Artificial Sequence
  Synthetic
cgagcuacaagcucaacgccgugg

SEQ ID NO: 16204 - RNA, 18 nt, Artificial Sequence
  Synthetic
accuggagaucgaggugg

SEQ ID NO: 16205 - RNA, 19 nt, Artificial Sequence
  Synthetic
uaccuggagaucgaggugg

SEQ ID NO: 16206 - RNA, 21 nt, Artificial Sequence
  Synthetic
acuaccuggagaucgaggugg

SEQ ID NO: 16207 - RNA, 22 nt, Artificial Sequence
  Synthetic
gacuaccuggagaucgaggugg

SEQ ID NO: 16208 - RNA, 23 nt, Artificial Sequence
  Synthetic
ggacuaccuggagaucgaggugg

SEQ ID NO: 16209 - RNA, 24 nt, Artificial Sequence
  Synthetic
aggacuaccuggagaucgaggugg

SEQ ID NO: 16210 - RNA, 18 nt, Artificial Sequence
  Synthetic
acuucgaggcggaggugg

SEQ ID NO: 16211 - RNA, 19 nt, Artificial Sequence
  Synthetic
cacuucgaggcggaggugg

SEQ ID NO: 16212 - RNA, 21 nt, Artificial Sequence
  Synthetic
accacuucgaggcggaggugg

SEQ ID NO: 16213 - RNA, 22 nt, Artificial Sequence
  Synthetic
gaccacuucgaggcggaggugg

SEQ ID NO: 16214 - RNA, 23 nt, Artificial Sequence
  Synthetic
ggaccacuucgaggcggaggugg

SEQ ID NO: 16215 - RNA, 24 nt, Artificial Sequence
  Synthetic
cggaccacuucgaggcggaggugg

SEQ ID NO: 16216 - RNA, 18 nt, Artificial Sequence
  Synthetic
agcuggccuuuccggugg

SEQ ID NO: 16217 - RNA, 19 nt, Artificial Sequence
  Synthetic
gagcuggccuuuccggugg

SEQ ID NO: 16218 - RNA, 21 nt, Artificial Sequence
  Synthetic
acgagcuggccuuuccggugg

SEQ ID NO: 16219 - RNA, 22 nt, Artificial Sequence
  Synthetic
gacgagcuggccuuuccggugg

SEQ ID NO: 16220 - RNA, 23 nt, Artificial Sequence
  Synthetic
ggacgagcuggccuuuccggugg

SEQ ID NO: 16221 - RNA, 24 nt, Artificial Sequence
  Synthetic
aggacgagcuggccuuuccggugg

SEQ ID NO: 16222 - RNA, 18 nt, Artificial Sequence
  Synthetic
auaaaggugaacggcaug

SEQ ID NO: 16223 - RNA, 19 nt, Artificial Sequence
  Synthetic
gauaaaggugaacggcaug

SEQ ID NO: 16224 - RNA, 21 nt, Artificial Sequence
  Synthetic
aagauaaaggugaacggcaug

SEQ ID NO: 16225 - RNA, 22 nt, Artificial Sequence
  Synthetic
caagauaaaggugaacggcaug

SEQ ID NO: 16226 - RNA, 23 nt, Artificial Sequence
  Synthetic
gcaagauaaaggugaacggcaug

SEQ ID NO: 16227 - RNA, 24 nt, Artificial Sequence
  Synthetic
agcaagauaaaggugaacggcaug

SEQ ID NO: 16228 - RNA, 18 nt, Artificial Sequence
  Synthetic
gccgugggcgacaagaug

SEQ ID NO: 16229 - RNA, 19 nt, Artificial Sequence
  Synthetic
ggccgugggcgacaagaug

SEQ ID NO: 16230 - RNA, 21 nt, Artificial Sequence
  Synthetic
acggccgugggcgacaagaug

SEQ ID NO: 16231 - RNA, 22 nt, Artificial Sequence
  Synthetic
gacggccgugggcgacaagaug

SEQ ID NO: 16232 - RNA, 23 nt, Artificial Sequence
  Synthetic
ugacggccgugggcgacaagaug

SEQ ID NO: 16233 - RNA, 24 nt, Artificial Sequence
  Synthetic
cugacggccgugggcgacaagaug

SEQ ID NO: 16234 - RNA, 18 nt, Artificial Sequence
  Synthetic
uauuacuucucccaccug

SEQ ID NO: 16235 - RNA, 19 nt, Artificial Sequence
  Synthetic
cuauuacuucucccaccug

SEQ ID NO: 16236 - RNA, 21 nt, Artificial Sequence
  Synthetic
gacuauuacuucucccaccug

SEQ ID NO: 16237 - RNA, 22 nt, Artificial Sequence
  Synthetic
ggacuauuacuucucccaccug

SEQ ID NO: 16238 - RNA, 23 nt, Artificial Sequence
  Synthetic
cggacuauuacuucucccaccug

SEQ ID NO: 16239 - RNA, 24 nt, Artificial Sequence
  Synthetic
acggacuauuacuucucccaccug

SEQ ID NO: 16240 - RNA, 18 nt, Artificial Sequence
  Synthetic
cuccucagcauccuccug

SEQ ID NO: 16241 - RNA, 19 nt, Artificial Sequence
  Synthetic
ccuccucagcauccuccug

SEQ ID NO: 16242 - RNA, 21 nt, Artificial Sequence
  Synthetic
agccuccucagcauccuccug

SEQ ID NO: 16243 - RNA, 22 nt, Artificial Sequence
  Synthetic
gagccuccucagcauccuccug

SEQ ID NO: 16244 - RNA, 23 nt, Artificial Sequence
  Synthetic
agagccuccucagcauccuccug

SEQ ID NO: 16245 - RNA, 24 nt, Artificial Sequence
  Synthetic
gagagccuccucagcauccuccug

SEQ ID NO: 16246 - RNA, 18 nt, Artificial Sequence
  Synthetic
guggccgaagccguccug

SEQ ID NO: 16247 - RNA, 19 nt, Artificial Sequence
  Synthetic
cguggccgaagccguccug

SEQ ID NO: 16248 - RNA, 21 nt, Artificial Sequence
  Synthetic
gccguggccgaagccguccug

SEQ ID NO: 16249 - RNA, 22 nt, Artificial Sequence
  Synthetic
cgccguggccgaagccguccug

SEQ ID NO: 16250 - RNA, 23 nt, Artificial Sequence
  Synthetic
acgccguggccgaagccguccug

SEQ ID NO: 16251 - RNA, 24 nt, Artificial Sequence
  Synthetic
aacgccguggccgaagccguccug

SEQ ID NO: 16252 - RNA, 18 nt, Artificial Sequence
  Synthetic
uucuugcuggccaagcug

SEQ ID NO: 16253 - RNA, 19 nt, Artificial Sequence
  Synthetic
cuucuugcuggccaagcug

SEQ ID NO: 16254 - RNA, 21 nt, Artificial Sequence
  Synthetic
cccuucuugcuggccaagcug

SEQ ID NO: 16255 - RNA, 22 nt, Artificial Sequence
  Synthetic
gcccuucuugcuggccaagcug

SEQ ID NO: 16256 - RNA, 23 nt, Artificial Sequence
  Synthetic
ggcccuucuugcuggccaagcug

SEQ ID NO: 16257 - RNA, 24 nt, Artificial Sequence
  Synthetic
uggcccuucuugcuggccaagcug

SEQ ID NO: 16258 - RNA, 18 nt, Artificial Sequence
  Synthetic
auacaggauucccugcug

SEQ ID NO: 16259 - RNA, 19 nt, Artificial Sequence
  Synthetic
cauacaggauucccugcug

SEQ ID NO: 16260 - RNA, 21 nt, Artificial Sequence
  Synthetic
ugcauacaggauucccugcug

SEQ ID NO: 16261 - RNA, 22 nt, Artificial Sequence
  Synthetic
cugcauacaggauucccugcug

SEQ ID NO: 16262 - RNA, 23 nt, Artificial Sequence
  Synthetic
acugcauacaggauucccugcug

SEQ ID NO: 16263 - RNA, 24 nt, Artificial Sequence
  Synthetic
uacugcauacaggauucccugcug

SEQ ID NO: 16264 - RNA, 18 nt, Artificial Sequence
  Synthetic
cagaagggcuuuauucug

SEQ ID NO: 16265 - RNA, 19 nt, Artificial Sequence
  Synthetic
ccagaagggcuuuauucug

SEQ ID NO: 16266 - RNA, 21 nt, Artificial Sequence
  Synthetic
gaccagaagggcuuuauucug

SEQ ID NO: 16267 - RNA, 22 nt, Artificial Sequence
  Synthetic
cgaccagaagggcuuuauucug

SEQ ID NO: 16268 - RNA, 23 nt, Artificial Sequence
  Synthetic
ccgaccagaagggcuuuauucug

SEQ ID NO: 16269 - RNA, 24 nt, Artificial Sequence
  Synthetic
gccgaccagaagggcuuuauucug

SEQ ID NO: 16270 - RNA, 18 nt, Artificial Sequence
  Synthetic
cggggcguguuucgcgug

SEQ ID NO: 16271 - RNA, 19 nt, Artificial Sequence
  Synthetic
ccggggcguguuucgcgug

SEQ ID NO: 16272 - RNA, 21 nt, Artificial Sequence
  Synthetic
ggccggggcguguuucgcgug

SEQ ID NO: 16273 - RNA, 22 nt, Artificial Sequence
  Synthetic
cggccggggcguguuucgcgug

SEQ ID NO: 16274 - RNA, 23 nt, Artificial Sequence
  Synthetic
acggccggggcguguuucgcgug

SEQ ID NO: 16275 - RNA, 24 nt, Artificial Sequence
  Synthetic
aacggccggggcguguuucgcgug

SEQ ID NO: 16276 - RNA, 18 nt, Artificial Sequence
  Synthetic
uaccuggagaucgaggug

SEQ ID NO: 16277 - RNA, 19 nt, Artificial Sequence
  Synthetic
cuaccuggagaucgaggug

SEQ ID NO: 16278 - RNA, 21 nt, Artificial Sequence
  Synthetic
gacuaccuggagaucgaggug

SEQ ID NO: 16279 - RNA, 22 nt, Artificial Sequence
  Synthetic
ggacuaccuggagaucgaggug

SEQ ID NO: 16280 - RNA, 23 nt, Artificial Sequence
  Synthetic
aggacuaccuggagaucgaggug

SEQ ID NO: 16281 - RNA, 24 nt, Artificial Sequence
  Synthetic
aaggacuaccuggagaucgaggug

SEQ ID NO: 16282 - RNA, 18 nt, Artificial Sequence
  Synthetic
cacuucgaggcggaggug

SEQ ID NO: 16283 - RNA, 19 nt, Artificial Sequence
  Synthetic
ccacuucgaggcggaggug

SEQ ID NO: 16284 - RNA, 21 nt, Artificial Sequence
  Synthetic
gaccacuucgaggcggaggug

SEQ ID NO: 16285 - RNA, 22 nt, Artificial Sequence
  Synthetic
ggaccacuucgaggcggaggug

SEQ ID NO: 16286 - RNA, 23 nt, Artificial Sequence
  Synthetic
cggaccacuucgaggcggaggug

SEQ ID NO: 16287 - RNA, 24 nt, Artificial Sequence
  Synthetic
gcggaccacuucgaggcggaggug

SEQ ID NO: 16288 - RNA, 18 nt, Artificial Sequence
  Synthetic
uggaauucgacagcgaau

SEQ ID NO: 16289 - RNA, 19 nt, Artificial Sequence
  Synthetic
cuggaauucgacagcgaau

SEQ ID NO: 16290 - RNA, 21 nt, Artificial Sequence
  Synthetic
uucuggaauucgacagcgaau

SEQ ID NO: 16291 - RNA, 22 nt, Artificial Sequence
  Synthetic
guucuggaauucgacagcgaau

SEQ ID NO: 16292 - RNA, 23 nt, Artificial Sequence
  Synthetic
gguucuggaauucgacagcgaau

SEQ ID NO: 16293 - RNA, 24 nt, Artificial Sequence
  Synthetic
ugguucuggaauucgacagcgaau

SEQ ID NO: 16294 - RNA, 18 nt, Artificial Sequence
  Synthetic
uuuaaguuuuugccccau

SEQ ID NO: 16295 - RNA, 19 nt, Artificial Sequence
  Synthetic
uuuuaaguuuuugccccau

SEQ ID NO: 16296 - RNA, 21 nt, Artificial Sequence
  Synthetic
uuuuuuaaguuuuugccccau

SEQ ID NO: 16297 - RNA, 22 nt, Artificial Sequence
  Synthetic
guuuuuuaaguuuuugccccau

SEQ ID NO: 16298 - RNA, 23 nt, Artificial Sequence
  Synthetic
uguuuuuuaaguuuuugccccau

SEQ ID NO: 16299 - RNA, 24 nt, Artificial Sequence
  Synthetic
cuguuuuuuaaguuuuugccccau

SEQ ID NO: 16300 - RNA, 18 nt, Artificial Sequence
  Synthetic
gcgggacuggcucgccau

SEQ ID NO: 16301 - RNA, 19 nt, Artificial Sequence
  Synthetic
ugcgggacuggcucgccau

SEQ ID NO: 16302 - RNA, 21 nt, Artificial Sequence
  Synthetic
ccugcgggacuggcucgccau

SEQ ID NO: 16303 - RNA, 22 nt, Artificial Sequence
  Synthetic
uccugcgggacuggcucgccau

SEQ ID NO: 16304 - RNA, 23 nt, Artificial Sequence
  Synthetic
cuccugcgggacuggcucgccau

SEQ ID NO: 16305 - RNA, 24 nt, Artificial Sequence
  Synthetic
ccuccugcgggacuggcucgccau

SEQ ID NO: 16306 - RNA, 18 nt, Artificial Sequence
  Synthetic
gcaucuccgcggaccacu

SEQ ID NO: 16307 - RNA, 19 nt, Artificial Sequence
  Synthetic
ggcaucuccgcggaccacu

SEQ ID NO: 16308 - RNA, 21 nt, Artificial Sequence
  Synthetic
gcggcaucuccgcggaccacu

SEQ ID NO: 16309 - RNA, 22 nt, Artificial Sequence
  Synthetic
cgcggcaucuccgcggaccacu

SEQ ID NO: 16310 - RNA, 23 nt, Artificial Sequence
  Synthetic
ccgcggcaucuccgcggaccacu

SEQ ID NO: 16311 - RNA, 24 nt, Artificial Sequence
  Synthetic
uccgcggcaucuccgcggaccacu

SEQ ID NO: 16312 - RNA, 18 nt, Artificial Sequence
  Synthetic
acgcuccugggccugacu

SEQ ID NO: 16313 - RNA, 19 nt, Artificial Sequence
  Synthetic
cacgcuccugggccugacu

SEQ ID NO: 16314 - RNA, 21 nt, Artificial Sequence
  Synthetic
aucacgcuccugggccugacu

SEQ ID NO: 16315 - RNA, 22 nt, Artificial Sequence
  Synthetic
caucacgcuccugggccugacu

SEQ ID NO: 16316 - RNA, 23 nt, Artificial Sequence
  Synthetic
ucaucacgcuccugggccugacu

SEQ ID NO: 16317 - RNA, 24 nt, Artificial Sequence
  Synthetic
gucaucacgcuccugggccugacu

SEQ ID NO: 16318 - RNA, 18 nt, Artificial Sequence
  Synthetic
gcaccgacguguacuacu

SEQ ID NO: 16319 - RNA, 19 nt, Artificial Sequence
  Synthetic
cgcaccgacguguacuacu

SEQ ID NO: 16320 - RNA, 21 nt, Artificial Sequence
  Synthetic
agcgcaccgacguguacuacu

SEQ ID NO: 16321 - RNA, 22 nt, Artificial Sequence
  Synthetic
gagcgcaccgacguguacuacu

SEQ ID NO: 16322 - RNA, 23 nt, Artificial Sequence
  Synthetic
ggagcgcaccgacguguacuacu

SEQ ID NO: 16323 - RNA, 24 nt, Artificial Sequence
  Synthetic
uggagcgcaccgacguguacuacu

SEQ ID NO: 16324 - RNA, 18 nt, Artificial Sequence
  Synthetic
cuucagcacgcucucccu

SEQ ID NO: 16325 - RNA, 19 nt, Artificial Sequence
  Synthetic
gcuucagcacgcucucccu

SEQ ID NO: 16326 - RNA, 21 nt, Artificial Sequence
  Synthetic
gugcuucagcacgcucucccu

SEQ ID NO: 16327 - RNA, 22 nt, Artificial Sequence
  Synthetic
ugugcuucagcacgcucucccu

SEQ ID NO: 16328 - RNA, 23 nt, Artificial Sequence
  Synthetic
cugugcuucagcacgcucucccu

SEQ ID NO: 16329 - RNA, 24 nt, Artificial Sequence
  Synthetic
ccugugcuucagcacgcucucccu

SEQ ID NO: 16330 - RNA, 18 nt, Artificial Sequence
  Synthetic
acgcgcgcugggcggccu

SEQ ID NO: 16331 - RNA, 19 nt, Artificial Sequence
  Synthetic
cacgcgcgcugggcggccu

SEQ ID NO: 16332 - RNA, 21 nt, Artificial Sequence
  Synthetic
uccacgcgcgcugggcggccu

SEQ ID NO: 16333 - RNA, 22 nt, Artificial Sequence
  Synthetic
guccacgcgcgcugggcggccu

SEQ ID NO: 16334 - RNA, 23 nt, Artificial Sequence
  Synthetic
cguccacgcgcgcugggcggccu

SEQ ID NO: 16335 - RNA, 24 nt, Artificial Sequence
  Synthetic
acguccacgcgcgcugggcggccu

SEQ ID NO: 16336 - RNA, 18 nt, Artificial Sequence
  Synthetic
cggcggccccgauggccu

SEQ ID NO: 16337 - RNA, 19 nt, Artificial Sequence
  Synthetic
ccggcggccccgauggccu

SEQ ID NO: 16338 - RNA, 21 nt, Artificial Sequence
  Synthetic
agccggcggccccgauggccu

SEQ ID NO: 16339 - RNA, 22 nt, Artificial Sequence
  Synthetic
cagccggcggccccgauggccu

SEQ ID NO: 16340 - RNA, 23 nt, Artificial Sequence
  Synthetic
ccagccggcggccccgauggccu

SEQ ID NO: 16341 - RNA, 24 nt, Artificial Sequence
  Synthetic
cccagccggcggccccgauggccu

SEQ ID NO: 16342 - RNA, 18 nt, Artificial Sequence
  Synthetic
ccuccucagcauccuccu

SEQ ID NO: 16343 - RNA, 19 nt, Artificial Sequence
  Synthetic
gccuccucagcauccuccu

SEQ ID NO: 16344 - RNA, 21 nt, Artificial Sequence
  Synthetic
gagccuccucagcauccuccu

SEQ ID NO: 16345 - RNA, 22 nt, Artificial Sequence
  Synthetic
agagccuccucagcauccuccu

SEQ ID NO: 16346 - RNA, 23 nt, Artificial Sequence
  Synthetic
gagagccuccucagcauccuccu

SEQ ID NO: 16347 - RNA, 24 nt, Artificial Sequence
  Synthetic
agagagccuccucagcauccuccu

SEQ ID NO: 16348 - RNA, 18 nt, Artificial Sequence
  Synthetic
cgacguggccgcgcggcu

SEQ ID NO: 16349 - RNA, 19 nt, Artificial Sequence
  Synthetic
acgacguggccgcgcggcu

SEQ ID NO: 16350 - RNA, 21 nt, Artificial Sequence
  Synthetic
ggacgacguggccgcgcggcu

SEQ ID NO: 16351 - RNA, 22 nt, Artificial Sequence
  Synthetic
cggacgacguggccgcgcggcu

SEQ ID NO: 16352 - RNA, 23 nt, Artificial Sequence
  Synthetic
ccggacgacguggccgcgcggcu

SEQ ID NO: 16353 - RNA, 24 nt, Artificial Sequence
  Synthetic
cccggacgacguggccgcgcggcu

SEQ ID NO: 16354 - RNA, 18 nt, Artificial Sequence
  Synthetic
auuccaugcgcaucaucu

SEQ ID NO: 16355 - RNA, 19 nt, Artificial Sequence
  Synthetic
uauuccaugcgcaucaucu

SEQ ID NO: 16356 - RNA, 21 nt, Artificial Sequence
  Synthetic
ccuauuccaugcgcaucaucu

SEQ ID NO: 16357 - RNA, 22 nt, Artificial Sequence
  Synthetic
cccuauuccaugcgcaucaucu

SEQ ID NO: 16358 - RNA, 23 nt, Artificial Sequence
  Synthetic
gcccuauuccaugcgcaucaucu

SEQ ID NO: 16359 - RNA, 24 nt, Artificial Sequence
  Synthetic
ggcccuauuccaugcgcaucaucu

SEQ ID NO: 16360 - RNA, 18 nt, Artificial Sequence
  Synthetic
aguacaucggcgucaucu

SEQ ID NO: 16361 - RNA, 19 nt, Artificial Sequence
  Synthetic
aaguacaucggcgucaucu

SEQ ID NO: 16362 - RNA, 21 nt, Artificial Sequence
  Synthetic
aaaaguacaucggcgucaucu

SEQ ID NO: 16363 - RNA, 22 nt, Artificial Sequence
  Synthetic
aaaaaguacaucggcgucaucu

SEQ ID NO: 16364 - RNA, 23 nt, Artificial Sequence
  Synthetic
gaaaaaguacaucggcgucaucu

SEQ ID NO: 16365 - RNA, 24 nt, Artificial Sequence
  Synthetic
agaaaaaguacaucggcgucaucu

SEQ ID NO: 16366 - RNA, 18 nt, Artificial Sequence
  Synthetic
gcgccccacgagaucucu

SEQ ID NO: 16367 - RNA, 19 nt, Artificial Sequence
  Synthetic
cgcgccccacgagaucucu

SEQ ID NO: 16368 - RNA, 21 nt, Artificial Sequence
  Synthetic
gccgcgccccacgagaucucu

SEQ ID NO: 16369 - RNA, 22 nt, Artificial Sequence
  Synthetic
ugccgcgccccacgagaucucu

SEQ ID NO: 16370 - RNA, 23 nt, Artificial Sequence
  Synthetic
augccgcgccccacgagaucucu

SEQ ID NO: 16371 - RNA, 24 nt, Artificial Sequence
  Synthetic
aaugccgcgccccacgagaucucu

SEQ ID NO: 16372 - RNA, 18 nt, Artificial Sequence
  Synthetic
uuuacgacgauaccgucu

SEQ ID NO: 16373 - RNA, 19 nt, Artificial Sequence
  Synthetic
uuuuacgacgauaccgucu

SEQ ID NO: 16374 - RNA, 21 nt, Artificial Sequence
  Synthetic
uguuuuacgacgauaccgucu

SEQ ID NO: 16375 - RNA, 22 nt, Artificial Sequence
  Synthetic
cuguuuuacgacgauaccgucu

SEQ ID NO: 16376 - RNA, 23 nt, Artificial Sequence
  Synthetic
gcuguuuuacgacgauaccgucu

SEQ ID NO: 16377 - RNA, 24 nt, Artificial Sequence
  Synthetic
ugcuguuuuacgacgauaccgucu

SEQ ID NO: 16378 - RNA, 18 nt, Artificial Sequence
  Synthetic
gcccggccaucaagaagu

SEQ ID NO: 16379 - RNA, 19 nt, Artificial Sequence
  Synthetic
ugcccggccaucaagaagu

SEQ ID NO: 16380 - RNA, 21 nt, Artificial Sequence
  Synthetic
ucugcccggccaucaagaagu

SEQ ID NO: 16381 - RNA, 22 nt, Artificial Sequence
  Synthetic
uucugcccggccaucaagaagu

SEQ ID NO: 16382 - RNA, 23 nt, Artificial Sequence
  Synthetic
cuucugcccggccaucaagaagu

SEQ ID NO: 16383 - RNA, 24 nt, Artificial Sequence
  Synthetic
acuucugcccggccaucaagaagu

SEQ ID NO: 16384 - RNA, 18 nt, Artificial Sequence
  Synthetic
cccccaucaaacucgagu

SEQ ID NO: 16385 - RNA, 19 nt, Artificial Sequence
  Synthetic
ccccccaucaaacucgagu

SEQ ID NO: 16386 - RNA, 21 nt, Artificial Sequence
  Synthetic
ugccccccaucaaacucgagu

SEQ ID NO: 16387 - RNA, 22 nt, Artificial Sequence
  Synthetic
cugccccccaucaaacucgagu

SEQ ID NO: 16388 - RNA, 23 nt, Artificial Sequence
  Synthetic
ucugccccccaucaaacucgagu

SEQ ID NO: 16389 - RNA, 24 nt, Artificial Sequence
  Synthetic
uucugccccccaucaaacucgagu

SEQ ID NO: 16390 - RNA, 18 nt, Artificial Sequence
  Synthetic
cuucgucaaggcucacgu

SEQ ID NO: 16391 - RNA, 19 nt, Artificial Sequence
  Synthetic
ucuucgucaaggcucacgu

SEQ ID NO: 16392 - RNA, 21 nt, Artificial Sequence
  Synthetic
guucuucgucaaggcucacgu

SEQ ID NO: 16393 - RNA, 22 nt, Artificial Sequence
  Synthetic
uguucuucgucaaggcucacgu

SEQ ID NO: 16394 - RNA, 23 nt, Artificial Sequence
  Synthetic
cuguucuucgucaaggcucacgu

SEQ ID NO: 16395 - RNA, 24 nt, Artificial Sequence
  Synthetic
gcuguucuucgucaaggcucacgu

SEQ ID NO: 16396 - RNA, 18 nt, Artificial Sequence
  Synthetic
guuuuaccgcgucuacgu

SEQ ID NO: 16397 - RNA, 19 nt, Artificial Sequence
  Synthetic
uguuuuaccgcgucuacgu

SEQ ID NO: 16398 - RNA, 21 nt, Artificial Sequence
  Synthetic
ucuguuuuaccgcgucuacgu

SEQ ID NO: 16399 - RNA, 22 nt, Artificial Sequence
  Synthetic
cucuguuuuaccgcgucuacgu

SEQ ID NO: 16400 - RNA, 23 nt, Artificial Sequence
  Synthetic
gcucuguuuuaccgcgucuacgu

SEQ ID NO: 16401 - RNA, 24 nt, Artificial Sequence
  Synthetic
cgcucuguuuuaccgcgucuacgu

SEQ ID NO: 16402 - RNA, 18 nt, Artificial Sequence
  Synthetic
ccggggcguguuucgcgu

SEQ ID NO: 16403 - RNA, 19 nt, Artificial Sequence
  Synthetic
gccggggcguguuucgcgu

SEQ ID NO: 16404 - RNA, 21 nt, Artificial Sequence
  Synthetic
cggccggggcguguuucgcgu

SEQ ID NO: 16405 - RNA, 22 nt, Artificial Sequence
  Synthetic
acggccggggcguguuucgcgu

SEQ ID NO: 16406 - RNA, 23 nt, Artificial Sequence
  Synthetic
aacggccggggcguguuucgcgu

SEQ ID NO: 16407 - RNA, 24 nt, Artificial Sequence
  Synthetic
gaacggccggggcguguuucgcgu

SEQ ID NO: 16408 - RNA, 18 nt, Artificial Sequence
  Synthetic
ccgagggacugcaggcgu

SEQ ID NO: 16409 - RNA, 19 nt, Artificial Sequence
  Synthetic
cccgagggacugcaggcgu

SEQ ID NO: 16410 - RNA, 21 nt, Artificial Sequence
  Synthetic
ugcccgagggacugcaggcgu

SEQ ID NO: 16411 - RNA, 22 nt, Artificial Sequence
  Synthetic
cugcccgagggacugcaggcgu

SEQ ID NO: 16412 - RNA, 23 nt, Artificial Sequence
  Synthetic
ccugcccgagggacugcaggcgu

SEQ ID NO: 16413 - RNA, 24 nt, Artificial Sequence
  Synthetic
cccugcccgagggacugcaggcgu

SEQ ID NO: 16414 - RNA, 18 nt, Artificial Sequence
  Synthetic
cuaccuggagaucgaggu

SEQ ID NO: 16415 - RNA, 19 nt, Artificial Sequence
  Synthetic
acuaccuggagaucgaggu

SEQ ID NO: 16416 - RNA, 21 nt, Artificial Sequence
  Synthetic
ggacuaccuggagaucgaggu

SEQ ID NO: 16417 - RNA, 22 nt, Artificial Sequence
  Synthetic
aggacuaccuggagaucgaggu

SEQ ID NO: 16418 - RNA, 23 nt, Artificial Sequence
  Synthetic
aaggacuaccuggagaucgaggu

SEQ ID NO: 16419 - RNA, 24 nt, Artificial Sequence
  Synthetic
caaggacuaccuggagaucgaggu

SEQ ID NO: 16420 - RNA, 18 nt, Artificial Sequence
  Synthetic
ggcuccggaccgcagggu

SEQ ID NO: 16421 - RNA, 19 nt, Artificial Sequence
  Synthetic
cggcuccggaccgcagggu

SEQ ID NO: 16422 - RNA, 21 nt, Artificial Sequence
  Synthetic
cgcggcuccggaccgcagggu

SEQ ID NO: 16423 - RNA, 22 nt, Artificial Sequence
  Synthetic
gcgcggcuccggaccgcagggu

SEQ ID NO: 16424 - RNA, 23 nt, Artificial Sequence
  Synthetic
cgcgcggcuccggaccgcagggu

SEQ ID NO: 16425 - RNA, 24 nt, Artificial Sequence
  Synthetic
ccgcgcggcuccggaccgcagggu

SEQ ID NO: 16426 - RNA, 18 nt, Artificial Sequence
  Synthetic
uggugaacaucgacaugu

SEQ ID NO: 16427 - RNA, 19 nt, Artificial Sequence
  Synthetic
auggugaacaucgacaugu

SEQ ID NO: 16428 - RNA, 21 nt, Artificial Sequence
  Synthetic
gcauggugaacaucgacaugu

SEQ ID NO: 16429 - RNA, 22 nt, Artificial Sequence
  Synthetic
ggcauggugaacaucgacaugu

SEQ ID NO: 16430 - RNA, 23 nt, Artificial Sequence
  Synthetic
cggcauggugaacaucgacaugu

SEQ ID NO: 16431 - RNA, 24 nt, Artificial Sequence
  Synthetic
acggcauggugaacaucgacaugu

SEQ ID NO: 16432 - RNA, 18 nt, Artificial Sequence
  Synthetic
auuacuucucccaccugu

SEQ ID NO: 16433 - RNA, 19 nt, Artificial Sequence
  Synthetic
uauuacuucucccaccugu

SEQ ID NO: 16434 - RNA, 21 nt, Artificial Sequence
  Synthetic
acuauuacuucucccaccugu

SEQ ID NO: 16435 - RNA, 22 nt, Artificial Sequence
  Synthetic
gacuauuacuucucccaccugu

SEQ ID NO: 16436 - RNA, 23 nt, Artificial Sequence
  Synthetic
ggacuauuacuucucccaccugu

SEQ ID NO: 16437 - RNA, 24 nt, Artificial Sequence
  Synthetic
cggacuauuacuucucccaccugu

SEQ ID NO: 16438 - RNA, 18 nt, Artificial Sequence
  Synthetic
ugacauucaaggcccugu

SEQ ID NO: 16439 - RNA, 19 nt, Artificial Sequence
  Synthetic
gugacauucaaggcccugu

SEQ ID NO: 16440 - RNA, 21 nt, Artificial Sequence
  Synthetic
gcgugacauucaaggcccugu

SEQ ID NO: 16441 - RNA, 22 nt, Artificial Sequence
  Synthetic
ugcgugacauucaaggcccugu

SEQ ID NO: 16442 - RNA, 23 nt, Artificial Sequence
  Synthetic
gugcgugacauucaaggcccugu

SEQ ID NO: 16443 - RNA, 24 nt, Artificial Sequence
  Synthetic
cgugcgugacauucaaggcccugu

SEQ ID NO: 16444 - RNA, 18 nt, Artificial Sequence
  Synthetic
cccgcaagcugcuggugu

SEQ ID NO: 16445 - RNA, 19 nt, Artificial Sequence
  Synthetic
ccccgcaagcugcuggugu

SEQ ID NO: 16446 - RNA, 21 nt, Artificial Sequence
  Synthetic
agccccgcaagcugcuggugu

SEQ ID NO: 16447 - RNA, 22 nt, Artificial Sequence
  Synthetic
aagccccgcaagcugcuggugu

SEQ ID NO: 16448 - RNA, 23 nt, Artificial Sequence
  Synthetic
caagccccgcaagcugcuggugu

SEQ ID NO: 16449 - RNA, 24 nt, Artificial Sequence
  Synthetic
ccaagccccgcaagcugcuggugu

SEQ ID NO: 16450 - RNA, 18 nt, Artificial Sequence
  Synthetic
ggacacccaggggcgauu

SEQ ID NO: 16451 - RNA, 19 nt, Artificial Sequence
  Synthetic
cggacacccaggggcgauu

SEQ ID NO: 16452 - RNA, 21 nt, Artificial Sequence
  Synthetic
gccggacacccaggggcgauu

SEQ ID NO: 16453 - RNA, 22 nt, Artificial Sequence
  Synthetic
ugccggacacccaggggcgauu

SEQ ID NO: 16454 - RNA, 23 nt, Artificial Sequence
  Synthetic
cugccggacacccaggggcgauu

SEQ ID NO: 16455 - RNA, 24 nt, Artificial Sequence
  Synthetic
ucugccggacacccaggggcgauu

SEQ ID NO: 16456 - RNA, 18 nt, Artificial Sequence
  Synthetic
uuggccuucaugacccuu

SEQ ID NO: 16457 - RNA, 19 nt, Artificial Sequence
  Synthetic
guuggccuucaugacccuu

SEQ ID NO: 16458 - RNA, 21 nt, Artificial Sequence
  Synthetic
cuguuggccuucaugacccuu

SEQ ID NO: 16459 - RNA, 22 nt, Artificial Sequence
  Synthetic
gcuguuggccuucaugacccuu

SEQ ID NO: 16460 - RNA, 23 nt, Artificial Sequence
  Synthetic
ugcuguuggccuucaugacccuu

SEQ ID NO: 16461 - RNA, 24 nt, Artificial Sequence
  Synthetic
augcuguuggccuucaugacccuu

SEQ ID NO: 16462 - RNA, 18 nt, Artificial Sequence
  Synthetic
ggcggccccgauggccuu

SEQ ID NO: 16463 - RNA, 19 nt, Artificial Sequence
  Synthetic
cggcggccccgauggccuu

SEQ ID NO: 16464 - RNA, 21 nt, Artificial Sequence
  Synthetic
gccggcggccccgauggccuu

SEQ ID NO: 16465 - RNA, 22 nt, Artificial Sequence
  Synthetic
agccggcggccccgauggccuu

SEQ ID NO: 16466 - RNA, 23 nt, Artificial Sequence
  Synthetic
cagccggcggccccgauggccuu

SEQ ID NO: 16467 - RNA, 24 nt, Artificial Sequence
  Synthetic
ccagccggcggccccgauggccuu

SEQ ID NO: 16468 - RNA, 18 nt, Artificial Sequence
  Synthetic
cgagggacugcaggcguu

SEQ ID NO: 16469 - RNA, 19 nt, Artificial Sequence
  Synthetic
ccgagggacugcaggcguu

SEQ ID NO: 16470 - RNA, 21 nt, Artificial Sequence
  Synthetic
gcccgagggacugcaggcguu

SEQ ID NO: 16471 - RNA, 22 nt, Artificial Sequence
  Synthetic
ugcccgagggacugcaggcguu

SEQ ID NO: 16472 - RNA, 23 nt, Artificial Sequence
  Synthetic
cugcccgagggacugcaggcguu

SEQ ID NO: 16473 - RNA, 24 nt, Artificial Sequence
  Synthetic
ccugcccgagggacugcaggcguu

SEQ ID NO: 16474 - RNA, 18 nt, Artificial Sequence
  Synthetic
gcuccggaccgcaggguu

SEQ ID NO: 16475 - RNA, 19 nt, Artificial Sequence
  Synthetic
ggcuccggaccgcaggguu

SEQ ID NO: 16476 - RNA, 21 nt, Artificial Sequence
  Synthetic
gcggcuccggaccgcaggguu

SEQ ID NO: 16477 - RNA, 22 nt, Artificial Sequence
  Synthetic
cgcggcuccggaccgcaggguu

SEQ ID NO: 16478 - RNA, 23 nt, Artificial Sequence
  Synthetic
gcgcggcuccggaccgcaggguu

SEQ ID NO: 16479 - RNA, 24 nt, Artificial Sequence
  Synthetic
cgcgcggcuccggaccgcaggguu

SEQ ID NO: 16480 - RNA, 18 nt, Artificial Sequence
  Synthetic
cugcccacgcccgugguu

SEQ ID NO: 16481 - RNA, 19 nt, Artificial Sequence
  Synthetic
ccugcccacgcccgugguu

SEQ ID NO: 16482 - RNA, 21 nt, Artificial Sequence
  Synthetic
ggccugcccacgcccgugguu

SEQ ID NO: 16483 - RNA, 22 nt, Artificial Sequence
  Synthetic
gggccugcccacgcccgugguu

SEQ ID NO: 16484 - RNA, 23 nt, Artificial Sequence
  Synthetic
ggggccugcccacgcccgugguu

SEQ ID NO: 16485 - RNA, 24 nt, Artificial Sequence
  Synthetic
aggggccugcccacgcccgugguu

SEQ ID NO: 16486 - RNA, 18 nt, Artificial Sequence
  Synthetic
uuacuucucccaccuguu

SEQ ID NO: 16487 - RNA, 19 nt, Artificial Sequence
  Synthetic
auuacuucucccaccuguu

SEQ ID NO: 16488 - RNA, 21 nt, Artificial Sequence
  Synthetic
cuauuacuucucccaccuguu

SEQ ID NO: 16489 - RNA, 22 nt, Artificial Sequence
  Synthetic
acuauuacuucucccaccuguu

SEQ ID NO: 16490 - RNA, 23 nt, Artificial Sequence
  Synthetic
gacuauuacuucucccaccuguu

SEQ ID NO: 16491 - RNA, 24 nt, Artificial Sequence
  Synthetic
ggacuauuacuucucccaccuguu

SEQ ID NO: 16492 - RNA, 18 nt, Artificial Sequence
  Synthetic
gacauucaaggcccuguu

SEQ ID NO: 16493 - RNA, 19 nt, Artificial Sequence
  Synthetic
ugacauucaaggcccuguu

SEQ ID NO: 16494 - RNA, 21 nt, Artificial Sequence
  Synthetic
cgugacauucaaggcccuguu

SEQ ID NO: 16495 - RNA, 22 nt, Artificial Sequence
  Synthetic
gcgugacauucaaggcccuguu

SEQ ID NO: 16496 - RNA, 23 nt, Artificial Sequence
  Synthetic
ugcgugacauucaaggcccuguu

SEQ ID NO: 16497 - RNA, 24 nt, Artificial Sequence
  Synthetic
gugcgugacauucaaggcccuguu

SEQ ID NO: 16498 - RNA, 18 nt, Artificial Sequence
  Synthetic
gacacccaggggcgauuu

SEQ ID NO: 16499 - RNA, 19 nt, Artificial Sequence
  Synthetic
ggacacccaggggcgauuu

SEQ ID NO: 16500 - RNA, 21 nt, Artificial Sequence
  Synthetic
ccggacacccaggggcgauuu

SEQ ID NO: 16501 - RNA, 22 nt, Artificial Sequence
  Synthetic
gccggacacccaggggcgauuu

SEQ ID NO: 16502 - RNA, 23 nt, Artificial Sequence
  Synthetic
ugccggacacccaggggcgauuu

SEQ ID NO: 16503 - RNA, 24 nt, Artificial Sequence
  Synthetic
cugccggacacccaggggcgauuu

SEQ ID NO: 16504 - RNA, 17 nt, Artificial Sequence
  Synthetic
gaccgucgugcaccccg

SEQ ID NO: 16505 - RNA, 17 nt, Artificial Sequence
  Synthetic
ggcgcuggguuggcccg

SEQ ID NO: 16506 - RNA, 20 nt, Artificial Sequence
  Synthetic
ggugaccgucgugcaccccg

SEQ ID NO: 16507 - RNA, 17 nt, Artificial Sequence
  Synthetic
uccuccgcgucgggucg

SEQ ID NO: 16508 - RNA, 17 nt, Artificial Sequence
  Synthetic
cgcaguacaccuugggg

SEQ ID NO: 16509 - RNA, 20 nt, Artificial Sequence
  Synthetic
uauggcgcuggguuggcccg

SEQ ID NO: 16510 - RNA, 20 nt, Artificial Sequence
  Synthetic
acguccuccgcgucgggucg

SEQ ID NO: 16511 - RNA, 20 nt, Artificial Sequence
  Synthetic
ccccgcaguacaccuugggg

SEQ ID NO: 16512 - RNA, 17 nt, Artificial Sequence
  Synthetic
ucauccaggcccacaac

SEQ ID NO: 16513 - RNA, 17 nt, Artificial Sequence
  Synthetic
cagguacgacagcacac

SEQ ID NO: 16514 - RNA, 17 nt, Artificial Sequence
  Synthetic
cggccagcucggacacc

SEQ ID NO: 16515 - RNA, 17 nt, Artificial Sequence
  Synthetic
cgaccuugauggcggcc

SEQ ID NO: 16516 - RNA, 17 nt, Artificial Sequence
  Synthetic
ccucccgggcugcggcc

SEQ ID NO: 16517 - RNA, 17 nt, Artificial Sequence
  Synthetic
ggaccuuguaaaugucc

SEQ ID NO: 16518 - RNA, 17 nt, Artificial Sequence
  Synthetic
uuuucuuggcgaucagc

SEQ ID NO: 16519 - RNA, 17 nt, Artificial Sequence
  Synthetic
uaccggcauacaagcuc

SEQ ID NO: 16520 - RNA, 17 nt, Artificial Sequence
  Synthetic
uggagcucucggccguc

SEQ ID NO: 16521 - RNA, 17 nt, Artificial Sequence
  Synthetic
uucuucuuguccuucag

SEQ ID NO: 16522 - RNA, 17 nt, Artificial Sequence
  Synthetic
ggggaauccgcgagcgg

SEQ ID NO: 16523 - RNA, 17 nt, Artificial Sequence
  Synthetic
cguucaccuuuaucuug

SEQ ID NO: 16524 - RNA, 20 nt, Artificial Sequence
  Synthetic
gcaucauccaggcccacaac

SEQ ID NO: 16525 - RNA, 20 nt, Artificial Sequence
  Synthetic
gcacagguacgacagcacac

SEQ ID NO: 16526 - RNA, 20 nt, Artificial Sequence
  Synthetic
ccucggccagcucggacacc

SEQ ID NO: 16527 - RNA, 20 nt, Artificial Sequence
  Synthetic
acacgaccuugauggcggcc

SEQ ID NO: 16528 - RNA, 20 nt, Artificial Sequence
  Synthetic
cguccucccgggcugcggcc

SEQ ID NO: 16529 - RNA, 20 nt, Artificial Sequence
  Synthetic
gggggaccuuguaaaugucc

SEQ ID NO: 16530 - RNA, 20 nt, Artificial Sequence
  Synthetic
acuuuuucuuggcgaucagc

SEQ ID NO: 16531 - RNA, 20 nt, Artificial Sequence
  Synthetic
accuaccggcauacaagcuc

SEQ ID NO: 16532 - RNA, 20 nt, Artificial Sequence
  Synthetic
aucuggagcucucggccguc

SEQ ID NO: 16533 - RNA, 20 nt, Artificial Sequence
  Synthetic
uccuucuucuuguccuucag

SEQ ID NO: 16534 - RNA, 20 nt, Artificial Sequence
  Synthetic
ucuggggaauccgcgagcgg

SEQ ID NO: 16535 - RNA, 20 nt, Artificial Sequence
  Synthetic
ugccguucaccuuuaucuug

SEQ ID NO: 16536 - RNA, 17 nt, Artificial Sequence
  Synthetic
gagcuaucgaaccgugu

SEQ ID NO: 16537 - RNA, 20 nt, Artificial Sequence
  Synthetic
gaccaagagguccauugggu

SEQ ID NO: 16538 - RNA, 20 nt, Artificial Sequence
  Synthetic
ggagagcuaucgaaccgugu

SEQ ID NO: 16539 - RNA, 17 nt, Artificial Sequence
  Synthetic
ucgaccaagagguccau

SEQ ID NO: 16540 - RNA, 17 nt, Artificial Sequence
  Synthetic
cgaccaagagguccauu

SEQ ID NO: 16541 - RNA, 20 nt, Artificial Sequence
  Synthetic
cccguaucaaccccacccaa

SEQ ID NO: 16542 - RNA, 20 nt, Artificial Sequence
  Synthetic
uccauugggugggguugaua

SEQ ID NO: 16543 - RNA, 20 nt, Artificial Sequence
  Synthetic
cgaccaagagguccauuggg

SEQ ID NO: 16544 - RNA, 20 nt, Artificial Sequence
  Synthetic
accaagagguccauugggug

SEQ ID NO: 16545 - RNA, 20 nt, Artificial Sequence
  Synthetic
ucgucgaccaagagguccau

SEQ ID NO: 16546 - RNA, 20 nt, Artificial Sequence
  Synthetic
accccacccaauggaccucu

SEQ ID NO: 16547 - RNA, 20 nt, Artificial Sequence
  Synthetic
cgucgaccaagagguccauu

SEQ ID NO: 16548 - RNA, 17 nt, Artificial Sequence
  Synthetic
guaucaaccccacccaa

SEQ ID NO: 16549 - RNA, 17 nt, Artificial Sequence
  Synthetic
auugggugggguugaua

SEQ ID NO: 16550 - RNA, 17 nt, Artificial Sequence
  Synthetic
uugggugggguugauac

SEQ ID NO: 16551 - RNA, 17 nt, Artificial Sequence
  Synthetic
ccaagagguccauuggg

SEQ ID NO: 16552 - RNA, 17 nt, Artificial Sequence
  Synthetic
aagagguccauugggug

SEQ ID NO: 16553 - RNA, 17 nt, Artificial Sequence
  Synthetic
ccacccaauggaccucu

SEQ ID NO: 16554 - RNA, 17 nt, Artificial Sequence
  Synthetic
caagagguccauugggu

SEQ ID NO: 16555 - RNA, 20 nt, Artificial Sequence
  Synthetic
ccauugggugggguugauac

SEQ ID NO: 16556 - RNA, 17 nt, Artificial Sequence
  Synthetic
gacgaguacggugggua

SEQ ID NO: 16557 - RNA, 17 nt, Artificial Sequence
  Synthetic
uggguagggggcgcgac

SEQ ID NO: 16558 - RNA, 17 nt, Artificial Sequence
  Synthetic
gacgggggaugcggguc

SEQ ID NO: 16559 - RNA, 17 nt, Artificial Sequence
  Synthetic
acgaguacgguggguag

SEQ ID NO: 16560 - RNA, 17 nt, Artificial Sequence
  Synthetic
cgaguacgguggguagg

SEQ ID NO: 16561 - RNA, 17 nt, Artificial Sequence
  Synthetic
ugacgaguacggugggu

SEQ ID NO: 16562 - RNA, 20 nt, Artificial Sequence
  Synthetic
auugacgaguacggugggua

SEQ ID NO: 16563 - RNA, 20 nt, Artificial Sequence
  Synthetic
cgguggguagggggcgcgac

SEQ ID NO: 16564 - RNA, 20 nt, Artificial Sequence
  Synthetic
uugacgaguacgguggguag

SEQ ID NO: 16565 - RNA, 20 nt, Artificial Sequence
  Synthetic
ugacgaguacgguggguagg

SEQ ID NO: 16566 - RNA, 20 nt, Artificial Sequence
  Synthetic
aauugacgaguacggugggu

SEQ ID NO: 16567 - RNA, 21 nt, Artificial Sequence
  Synthetic
gcucgucgaccaagaggucca

SEQ ID NO: 16568 - RNA, 18 nt, Artificial Sequence
  Synthetic
guacagcgggggggccgc

SEQ ID NO: 16569 - RNA, 23 nt, Artificial Sequence
  Synthetic
guugcguacagcgggggggccgc

SEQ ID NO: 16570 - RNA, 22 nt, Artificial Sequence
  Synthetic
gagggcggcgggggggacgggc

SEQ ID NO: 16571 - RNA, 18 nt, Artificial Sequence
  Synthetic
ggccacgucgccgugggc

SEQ ID NO: 16572 - RNA, 21 nt, Artificial Sequence
  Synthetic
gaaggccacgucgccgugggc

SEQ ID NO: 16573 - RNA, 22 nt, Artificial Sequence
  Synthetic
ggaaggccacgucgccgugggc

SEQ ID NO: 16574 - RNA, 23 nt, Artificial Sequence
  Synthetic
gggaaggccacgucgccgugggc

SEQ ID NO: 16575 - RNA, 18 nt, Artificial Sequence
  Synthetic
guagagcccgaggccguc

SEQ ID NO: 16576 - RNA, 21 nt, Artificial Sequence
  Synthetic
guaguagagcccgaggccguc

SEQ ID NO: 16577 - RNA, 19 nt, Artificial Sequence
  Synthetic
gaccaagagguccauuggg

SEQ ID NO: 16578 - RNA, 22 nt, Artificial Sequence
  Synthetic
gucgaccaagagguccauuggg

SEQ ID NO: 16579 - RNA, 18 nt, Artificial Sequence
  Synthetic
gugggcgcgaaugucgau

SEQ ID NO: 16580 - RNA, 21 nt, Artificial Sequence
  Synthetic
gccgugggcgcgaaugucgau

SEQ ID NO: 16581 - RNA, 24 nt, Artificial Sequence
  Synthetic
gucgccgugggcgcgaaugucgau

SEQ ID NO: 16582 - RNA, 23 nt, Artificial Sequence
  Synthetic
guaccaugcucgauaccuggaac

SEQ ID NO: 16583 - RNA, 18 nt, Artificial Sequence
  Synthetic
cgucgaccaagaggucca

SEQ ID NO: 16584 - RNA, 19 nt, Artificial Sequence
  Synthetic
ucgucgaccaagaggucca

SEQ ID NO: 16585 - RNA, 20 nt, Artificial Sequence
  Synthetic
cucgucgaccaagaggucca

SEQ ID NO: 16586 - RNA, 22 nt, Artificial Sequence
  Synthetic
agcucgucgaccaagaggucca

SEQ ID NO: 16587 - RNA, 23 nt, Artificial Sequence
  Synthetic
cagcucgucgaccaagaggucca

SEQ ID NO: 16588 - RNA, 24 nt, Artificial Sequence
  Synthetic
acagcucgucgaccaagaggucca

SEQ ID NO: 16589 - RNA, 19 nt, Artificial Sequence
  Synthetic
cguacagcgggggggccgc

SEQ ID NO: 16590 - RNA, 21 nt, Artificial Sequence
  Synthetic
ugcguacagcgggggggccgc

SEQ ID NO: 16591 - RNA, 22 nt, Artificial Sequence
  Synthetic
uugcguacagcgggggggccgc

SEQ ID NO: 16592 - RNA, 24 nt, Artificial Sequence
  Synthetic
cguugcguacagcgggggggccgc

SEQ ID NO: 16593 - RNA, 21 nt, Artificial Sequence
  Synthetic
agggcggcgggggggacgggc

SEQ ID NO: 16594 - RNA, 23 nt, Artificial Sequence
  Synthetic
agagggcggcgggggggacgggc

SEQ ID NO: 16595 - RNA, 24 nt, Artificial Sequence
  Synthetic
aagagggcggcgggggggacgggc

SEQ ID NO: 16596 - RNA, 19 nt, Artificial Sequence
  Synthetic
aggccacgucgccgugggc

SEQ ID NO: 16597 - RNA, 24 nt, Artificial Sequence
  Synthetic
agggaaggccacgucgccgugggc

SEQ ID NO: 16598 - RNA, 19 nt, Artificial Sequence
  Synthetic
aguagagcccgaggccguc

SEQ ID NO: 16599 - RNA, 22 nt, Artificial Sequence
  Synthetic
cguaguagagcccgaggccguc

SEQ ID NO: 16600 - RNA, 23 nt, Artificial Sequence
  Synthetic
ucguaguagagcccgaggccguc

SEQ ID NO: 16601 - RNA, 24 nt, Artificial Sequence
  Synthetic
uucguaguagagcccgaggccguc

SEQ ID NO: 16602 - RNA, 18 nt, Artificial Sequence
  Synthetic
accaagagguccauuggg

SEQ ID NO: 16603 - RNA, 21 nt, Artificial Sequence
  Synthetic
ucgaccaagagguccauuggg

SEQ ID NO: 16604 - RNA, 23 nt, Artificial Sequence
  Synthetic
cgucgaccaagagguccauuggg

SEQ ID NO: 16605 - RNA, 24 nt, Artificial Sequence
  Synthetic
ucgucgaccaagagguccauuggg

SEQ ID NO: 16606 - RNA, 19 nt, Artificial Sequence
  Synthetic
cgugggcgcgaaugucgau

SEQ ID NO: 16607 - RNA, 22 nt, Artificial Sequence
  Synthetic
cgccgugggcgcgaaugucgau

SEQ ID NO: 16608 - RNA, 23 nt, Artificial Sequence
  Synthetic
ucgccgugggcgcgaaugucgau

SEQ ID NO: 16609 - RNA, 21 nt, Artificial Sequence
  Synthetic
acaucgcugggcagcguugau

SEQ ID NO: 16610 - RNA, 22 nt, Artificial Sequence
  Synthetic
cacaucgcugggcagcguugau

SEQ ID NO: 16611 - RNA, 23 nt, Artificial Sequence
  Synthetic
ccacaucgcugggcagcguugau

SEQ ID NO: 16612 - RNA, 24 nt, Artificial Sequence
  Synthetic
accacaucgcugggcagcguugau

SEQ ID NO: 16613 - RNA, 18 nt, Artificial Sequence
  Synthetic
augcucgauaccuggaac

SEQ ID NO: 16614 - RNA, 19 nt, Artificial Sequence
  Synthetic
caugcucgauaccuggaac

SEQ ID NO: 16615 - RNA, 21 nt, Artificial Sequence
  Synthetic
accaugcucgauaccuggaac

SEQ ID NO: 16616 - RNA, 22 nt, Artificial Sequence
  Synthetic
uaccaugcucgauaccuggaac

SEQ ID NO: 16617 - RNA, 24 nt, Artificial Sequence
  Synthetic
uguaccaugcucgauaccuggaac

SEQ ID NO: 16618 - RNA, 21 nt, Artificial Sequence
  Synthetic
cgaccaacgccgaccuguacc

SEQ ID NO: 16619 - RNA, 22 nt, Artificial Sequence
  Synthetic
ccgaccaacgccgaccuguacc

SEQ ID NO: 16620 - RNA, 23 nt, Artificial Sequence
  Synthetic
accgaccaacgccgaccuguacc

SEQ ID NO: 16621 - RNA, 24 nt, Artificial Sequence
  Synthetic
uaccgaccaacgccgaccuguacc

SEQ ID NO: 16622 - RNA, 21 nt, Artificial Sequence
  Synthetic
caacgcugcccagcgaugugg

SEQ ID NO: 16623 - RNA, 22 nt, Artificial Sequence
  Synthetic
ucaacgcugcccagcgaugugg

SEQ ID NO: 16624 - RNA, 23 nt, Artificial Sequence
  Synthetic
aucaacgcugcccagcgaugugg

SEQ ID NO: 16625 - RNA, 24 nt, Artificial Sequence
  Synthetic
uaucaacgcugcccagcgaugugg

SEQ ID NO: 16626 - RNA, 18 nt, Artificial Sequence
  Synthetic
gcggcgggggggacgggc

SEQ ID NO: 16627 - RNA, 19 nt, Artificial Sequence
  Synthetic
ggcggcgggggggacgggc

SEQ ID NO: 16628 - RNA, 18 nt, Artificial Sequence
  Synthetic
ucgcugggcagcguugau

SEQ ID NO: 16629 - RNA, 19 nt, Artificial Sequence
  Synthetic
aucgcugggcagcguugau

SEQ ID NO: 16630 - RNA, 18 nt, Artificial Sequence
  Synthetic
ccaacgccgaccuguacc

SEQ ID NO: 16631 - RNA, 19 nt, Artificial Sequence
  Synthetic
accaacgccgaccuguacc

SEQ ID NO: 16632 - RNA, 18 nt, Artificial Sequence
  Synthetic
ccgcccccccgcccggcc

SEQ ID NO: 16633 - RNA, 19 nt, Artificial Sequence
  Synthetic
accgcccccccgcccggcc

SEQ ID NO: 16634 - RNA, 21 nt, Artificial Sequence
  Synthetic
ccaccgcccccccgcccggcc

SEQ ID NO: 16635 - RNA, 22 nt, Artificial Sequence
  Synthetic
gccaccgcccccccgcccggcc

SEQ ID NO: 16636 - RNA, 23 nt, Artificial Sequence
  Synthetic
cgccaccgcccccccgcccggcc

SEQ ID NO: 16637 - RNA, 24 nt, Artificial Sequence
  Synthetic
ucgccaccgcccccccgcccggcc

SEQ ID NO: 16638 - RNA, 18 nt, Artificial Sequence
  Synthetic
cgcugcccagcgaugugg

SEQ ID NO: 16639 - RNA, 19 nt, Artificial Sequence
  Synthetic
acgcugcccagcgaugugg

SEQ ID NO: 16640 - RNA, 18 nt, Artificial Sequence
  Synthetic
gucgaggagacgguuaaa

SEQ ID NO: 16641 - RNA, 19 nt, Artificial Sequence
  Synthetic
cgucgaggagacgguuaaa

SEQ ID NO: 16642 - RNA, 21 nt, Artificial Sequence
  Synthetic
gucgucgaggagacgguuaaa

SEQ ID NO: 16643 - RNA, 22 nt, Artificial Sequence
  Synthetic
agucgucgaggagacgguuaaa

SEQ ID NO: 16644 - RNA, 23 nt, Artificial Sequence
  Synthetic
aagucgucgaggagacgguuaaa

SEQ ID NO: 16645 - RNA, 24 nt, Artificial Sequence
  Synthetic
caagucgucgaggagacgguuaaa

SEQ ID NO: 16646 - RNA, 18 nt, Artificial Sequence
  Synthetic
uagcucggcguggaagaa

SEQ ID NO: 16647 - RNA, 19 nt, Artificial Sequence
  Synthetic
guagcucggcguggaagaa

SEQ ID NO: 16648 - RNA, 21 nt, Artificial Sequence
  Synthetic
ccguagcucggcguggaagaa

SEQ ID NO: 16649 - RNA, 22 nt, Artificial Sequence
  Synthetic
cccguagcucggcguggaagaa

SEQ ID NO: 16650 - RNA, 23 nt, Artificial Sequence
  Synthetic
gcccguagcucggcguggaagaa

SEQ ID NO: 16651 - RNA, 24 nt, Artificial Sequence
  Synthetic
cgcccguagcucggcguggaagaa

SEQ ID NO: 16652 - RNA, 18 nt, Artificial Sequence
  Synthetic
ggcgccccguugcguaca

SEQ ID NO: 16653 - RNA, 19 nt, Artificial Sequence
  Synthetic
aggcgccccguugcguaca

SEQ ID NO: 16654 - RNA, 21 nt, Artificial Sequence
  Synthetic
ucaggcgccccguugcguaca

SEQ ID NO: 16655 - RNA, 22 nt, Artificial Sequence
  Synthetic
cucaggcgccccguugcguaca

SEQ ID NO: 16656 - RNA, 23 nt, Artificial Sequence
  Synthetic
gcucaggcgccccguugcguaca

SEQ ID NO: 16657 - RNA, 24 nt, Artificial Sequence
  Synthetic
ggcucaggcgccccguugcguaca

SEQ ID NO: 16658 - RNA, 18 nt, Artificial Sequence
  Synthetic
ucggcguggaagaaacga

SEQ ID NO: 16659 - RNA, 19 nt, Artificial Sequence
  Synthetic
cucggcguggaagaaacga

SEQ ID NO: 16660 - RNA, 21 nt, Artificial Sequence
  Synthetic
agcucggcguggaagaaacga

SEQ ID NO: 16661 - RNA, 22 nt, Artificial Sequence
  Synthetic
uagcucggcguggaagaaacga

SEQ ID NO: 16662 - RNA, 23 nt, Artificial Sequence
  Synthetic
guagcucggcguggaagaaacga

SEQ ID NO: 16663 - RNA, 24 nt, Artificial Sequence
  Synthetic
cguagcucggcguggaagaaacga

SEQ ID NO: 16664 - RNA, 18 nt, Artificial Sequence
  Synthetic
aucgcugggcagcguuga

SEQ ID NO: 16665 - RNA, 19 nt, Artificial Sequence
  Synthetic
caucgcugggcagcguuga

SEQ ID NO: 16666 - RNA, 21 nt, Artificial Sequence
  Synthetic
cacaucgcugggcagcguuga

SEQ ID NO: 16667 - RNA, 22 nt, Artificial Sequence
  Synthetic
ccacaucgcugggcagcguuga

SEQ ID NO: 16668 - RNA, 23 nt, Artificial Sequence
  Synthetic
accacaucgcugggcagcguuga

SEQ ID NO: 16669 - RNA, 24 nt, Artificial Sequence
  Synthetic
caccacaucgcugggcagcguuga

SEQ ID NO: 16670 - RNA, 18 nt, Artificial Sequence
  Synthetic
cauugggugggguugaua

SEQ ID NO: 16671 - RNA, 19 nt, Artificial Sequence
  Synthetic
ccauugggugggguugaua

SEQ ID NO: 16672 - RNA, 21 nt, Artificial Sequence
  Synthetic
guccauugggugggguugaua

SEQ ID NO: 16673 - RNA, 22 nt, Artificial Sequence
  Synthetic
gguccauugggugggguugaua

SEQ ID NO: 16674 - RNA, 23 nt, Artificial Sequence
  Synthetic
agguccauugggugggguugaua

SEQ ID NO: 16675 - RNA, 24 nt, Artificial Sequence
  Synthetic
gagguccauugggugggguugaua

SEQ ID NO: 16676 - RNA, 18 nt, Artificial Sequence
  Synthetic
cggguggccggaagcgua

SEQ ID NO: 16677 - RNA, 19 nt, Artificial Sequence
  Synthetic
gcggguggccggaagcgua

SEQ ID NO: 16678 - RNA, 21 nt, Artificial Sequence
  Synthetic
ucgcggguggccggaagcgua

SEQ ID NO: 16679 - RNA, 22 nt, Artificial Sequence
  Synthetic
gucgcggguggccggaagcgua

SEQ ID NO: 16680 - RNA, 23 nt, Artificial Sequence
  Synthetic
cgucgcggguggccggaagcgua

SEQ ID NO: 16681 - RNA, 24 nt, Artificial Sequence
  Synthetic
ccgucgcggguggccggaagcgua

SEQ ID NO: 16682 - RNA, 18 nt, Artificial Sequence
  Synthetic
agauccucguuccaggua

SEQ ID NO: 16683 - RNA, 19 nt, Artificial Sequence
  Synthetic
cagauccucguuccaggua

SEQ ID NO: 16684 - RNA, 21 nt, Artificial Sequence
  Synthetic
aacagauccucguuccaggua

SEQ ID NO: 16685 - RNA, 22 nt, Artificial Sequence
  Synthetic
aaacagauccucguuccaggua

SEQ ID NO: 16686 - RNA, 23 nt, Artificial Sequence
  Synthetic
aaaacagauccucguuccaggua

SEQ ID NO: 16687 - RNA, 24 nt, Artificial Sequence
  Synthetic
gaaaacagauccucguuccaggua

SEQ ID NO: 16688 - RNA, 18 nt, Artificial Sequence
  Synthetic
ucgucgaggagacgguua

SEQ ID NO: 16689 - RNA, 19 nt, Artificial Sequence
  Synthetic
gucgucgaggagacgguua

SEQ ID NO: 16690 - RNA, 21 nt, Artificial Sequence
  Synthetic
aagucgucgaggagacgguua

SEQ ID NO: 16691 - RNA, 22 nt, Artificial Sequence
  Synthetic
caagucgucgaggagacgguua

SEQ ID NO: 16692 - RNA, 23 nt, Artificial Sequence
  Synthetic
ccaagucgucgaggagacgguua

SEQ ID NO: 16693 - RNA, 24 nt, Artificial Sequence
  Synthetic
cccaagucgucgaggagacgguua

SEQ ID NO: 16694 - RNA, 18 nt, Artificial Sequence
  Synthetic
gcucggcguggaagaaac

SEQ ID NO: 16695 - RNA, 19 nt, Artificial Sequence
  Synthetic
agcucggcguggaagaaac

SEQ ID NO: 16696 - RNA, 21 nt, Artificial Sequence
  Synthetic
guagcucggcguggaagaaac

SEQ ID NO: 16697 - RNA, 22 nt, Artificial Sequence
  Synthetic
cguagcucggcguggaagaaac

SEQ ID NO: 16698 - RNA, 23 nt, Artificial Sequence
  Synthetic
ccguagcucggcguggaagaaac

SEQ ID NO: 16699 - RNA, 24 nt, Artificial Sequence
  Synthetic
cccguagcucggcguggaagaaac

SEQ ID NO: 16700 - RNA, 18 nt, Artificial Sequence
  Synthetic
auugggugggguugauac

SEQ ID NO: 16701 - RNA, 19 nt, Artificial Sequence
  Synthetic
cauugggugggguugauac

SEQ ID NO: 16702 - RNA, 21 nt, Artificial Sequence
  Synthetic
uccauugggugggguugauac

SEQ ID NO: 16703 - RNA, 22 nt, Artificial Sequence
  Synthetic
guccauugggugggguugauac

SEQ ID NO: 16704 - RNA, 23 nt, Artificial Sequence
  Synthetic
gguccauugggugggguugauac

SEQ ID NO: 16705 - RNA, 24 nt, Artificial Sequence
  Synthetic
agguccauugggugggguugauac

SEQ ID NO: 16706 - RNA, 18 nt, Artificial Sequence
  Synthetic
gcaaacagcucgucgacc

SEQ ID NO: 16707 - RNA, 19 nt, Artificial Sequence
  Synthetic
ggcaaacagcucgucgacc

SEQ ID NO: 16708 - RNA, 21 nt, Artificial Sequence
  Synthetic
ucggcaaacagcucgucgacc

SEQ ID NO: 16709 - RNA, 22 nt, Artificial Sequence
  Synthetic
gucggcaaacagcucgucgacc

SEQ ID NO: 16710 - RNA, 23 nt, Artificial Sequence
  Synthetic
ugucggcaaacagcucgucgacc

SEQ ID NO: 16711 - RNA, 24 nt, Artificial Sequence
  Synthetic
augucggcaaacagcucgucgacc

SEQ ID NO: 16712 - RNA, 18 nt, Artificial Sequence
  Synthetic
agggaaggccacgucgcc

SEQ ID NO: 16713 - RNA, 19 nt, Artificial Sequence
  Synthetic
uagggaaggccacgucgcc

SEQ ID NO: 16714 - RNA, 21 nt, Artificial Sequence
  Synthetic
cguagggaaggccacgucgcc

SEQ ID NO: 16715 - RNA, 22 nt, Artificial Sequence
  Synthetic
gcguagggaaggccacgucgcc

SEQ ID NO: 16716 - RNA, 23 nt, Artificial Sequence
  Synthetic
agcguagggaaggccacgucgcc

SEQ ID NO: 16717 - RNA, 24 nt, Artificial Sequence
  Synthetic
aagcguagggaaggccacgucgcc

SEQ ID NO: 16718 - RNA, 18 nt, Artificial Sequence
  Synthetic
cgccccguugcguacagc

SEQ ID NO: 16719 - RNA, 19 nt, Artificial Sequence
  Synthetic
gcgccccguugcguacagc

SEQ ID NO: 16720 - RNA, 21 nt, Artificial Sequence
  Synthetic
aggcgccccguugcguacagc

SEQ ID NO: 16721 - RNA, 22 nt, Artificial Sequence
  Synthetic
caggcgccccguugcguacagc

SEQ ID NO: 16722 - RNA, 23 nt, Artificial Sequence
  Synthetic
ucaggcgccccguugcguacagc

SEQ ID NO: 16723 - RNA, 24 nt, Artificial Sequence
  Synthetic
cucaggcgccccguugcguacagc

SEQ ID NO: 16724 - RNA, 18 nt, Artificial Sequence
  Synthetic
agcgcuucguaguagagc

SEQ ID NO: 16725 - RNA, 19 nt, Artificial Sequence
  Synthetic
gagcgcuucguaguagagc

SEQ ID NO: 16726 - RNA, 21 nt, Artificial Sequence
  Synthetic
gagagcgcuucguaguagagc

SEQ ID NO: 16727 - RNA, 22 nt, Artificial Sequence
  Synthetic
agagagcgcuucguaguagagc

SEQ ID NO: 16728 - RNA, 23 nt, Artificial Sequence
  Synthetic
gagagagcgcuucguaguagagc

SEQ ID NO: 16729 - RNA, 24 nt, Artificial Sequence
  Synthetic
cgagagagcgcuucguaguagagc

SEQ ID NO: 16730 - RNA, 18 nt, Artificial Sequence
  Synthetic
ucgagcaugguacauagc

SEQ ID NO: 16731 - RNA, 19 nt, Artificial Sequence
  Synthetic
aucgagcaugguacauagc

SEQ ID NO: 16732 - RNA, 21 nt, Artificial Sequence
  Synthetic
guaucgagcaugguacauagc

SEQ ID NO: 16733 - RNA, 22 nt, Artificial Sequence
  Synthetic
gguaucgagcaugguacauagc

SEQ ID NO: 16734 - RNA, 23 nt, Artificial Sequence
  Synthetic
agguaucgagcaugguacauagc

SEQ ID NO: 16735 - RNA, 24 nt, Artificial Sequence
  Synthetic
cagguaucgagcaugguacauagc

SEQ ID NO: 16736 - RNA, 18 nt, Artificial Sequence
  Synthetic
acgguuaaagagggcggc

SEQ ID NO: 16737 - RNA, 19 nt, Artificial Sequence
  Synthetic
gacgguuaaagagggcggc

SEQ ID NO: 16738 - RNA, 21 nt, Artificial Sequence
  Synthetic
gagacgguuaaagagggcggc

SEQ ID NO: 16739 - RNA, 22 nt, Artificial Sequence
  Synthetic
ggagacgguuaaagagggcggc

SEQ ID NO: 16740 - RNA, 23 nt, Artificial Sequence
  Synthetic
aggagacgguuaaagagggcggc

SEQ ID NO: 16741 - RNA, 24 nt, Artificial Sequence
  Synthetic
gaggagacgguuaaagagggcggc

SEQ ID NO: 16742 - RNA, 18 nt, Artificial Sequence
  Synthetic
ccgcgcccguagcucggc

SEQ ID NO: 16743 - RNA, 19 nt, Artificial Sequence
  Synthetic
cccgcgcccguagcucggc

SEQ ID NO: 16744 - RNA, 21 nt, Artificial Sequence
  Synthetic
cucccgcgcccguagcucggc

SEQ ID NO: 16745 - RNA, 22 nt, Artificial Sequence
  Synthetic
ccucccgcgcccguagcucggc

SEQ ID NO: 16746 - RNA, 23 nt, Artificial Sequence
  Synthetic
uccucccgcgcccguagcucggc

SEQ ID NO: 16747 - RNA, 24 nt, Artificial Sequence
  Synthetic
cuccucccgcgcccguagcucggc

SEQ ID NO: 16748 - RNA, 18 nt, Artificial Sequence
  Synthetic
ggcauggguggggagggc

SEQ ID NO: 16749 - RNA, 19 nt, Artificial Sequence
  Synthetic
gggcauggguggggagggc

SEQ ID NO: 16750 - RNA, 21 nt, Artificial Sequence
  Synthetic
acgggcauggguggggagggc

SEQ ID NO: 16751 - RNA, 22 nt, Artificial Sequence
  Synthetic
gacgggcauggguggggagggc

SEQ ID NO: 16752 - RNA, 23 nt, Artificial Sequence
  Synthetic
ggacgggcauggguggggagggc

SEQ ID NO: 16753 - RNA, 24 nt, Artificial Sequence
  Synthetic
gggacgggcauggguggggagggc

SEQ ID NO: 16754 - RNA, 18 nt, Artificial Sequence
  Synthetic
ugggacccccggccgggc

SEQ ID NO: 16755 - RNA, 19 nt, Artificial Sequence
  Synthetic
uugggacccccggccgggc

SEQ ID NO: 16756 - RNA, 21 nt, Artificial Sequence
  Synthetic
uuuugggacccccggccgggc

SEQ ID NO: 16757 - RNA, 22 nt, Artificial Sequence
  Synthetic
uuuuugggacccccggccgggc

SEQ ID NO: 16758 - RNA, 23 nt, Artificial Sequence
  Synthetic
guuuuugggacccccggccgggc

SEQ ID NO: 16759 - RNA, 24 nt, Artificial Sequence
  Synthetic
uguuuuugggacccccggccgggc

SEQ ID NO: 16760 - RNA, 18 nt, Artificial Sequence
  Synthetic
gaggccgucgcggguggc

SEQ ID NO: 16761 - RNA, 19 nt, Artificial Sequence
  Synthetic
cgaggccgucgcggguggc

SEQ ID NO: 16762 - RNA, 21 nt, Artificial Sequence
  Synthetic
cccgaggccgucgcggguggc

SEQ ID NO: 16763 - RNA, 22 nt, Artificial Sequence
  Synthetic
gcccgaggccgucgcggguggc

SEQ ID NO: 16764 - RNA, 23 nt, Artificial Sequence
  Synthetic
agcccgaggccgucgcggguggc

SEQ ID NO: 16765 - RNA, 24 nt, Artificial Sequence
  Synthetic
gagcccgaggccgucgcggguggc

SEQ ID NO: 16766 - RNA, 18 nt, Artificial Sequence
  Synthetic
gcuaaagcccaagucguc

SEQ ID NO: 16767 - RNA, 19 nt, Artificial Sequence
  Synthetic
cgcuaaagcccaagucguc

SEQ ID NO: 16768 - RNA, 21 nt, Artificial Sequence
  Synthetic
cgcgcuaaagcccaagucguc

SEQ ID NO: 16769 - RNA, 22 nt, Artificial Sequence
  Synthetic
ccgcgcuaaagcccaagucguc

SEQ ID NO: 16770 - RNA, 23 nt, Artificial Sequence
  Synthetic
cccgcgcuaaagcccaagucguc

SEQ ID NO: 16771 - RNA, 24 nt, Artificial Sequence
  Synthetic
gcccgcgcuaaagcccaagucguc

SEQ ID NO: 16772 - RNA, 18 nt, Artificial Sequence
  Synthetic
gucgauuugggugcguuc

SEQ ID NO: 16773 - RNA, 19 nt, Artificial Sequence
  Synthetic
ugucgauuugggugcguuc

SEQ ID NO: 16774 - RNA, 21 nt, Artificial Sequence
  Synthetic
aaugucgauuugggugcguuc

SEQ ID NO: 16775 - RNA, 22 nt, Artificial Sequence
  Synthetic
gaaugucgauuugggugcguuc

SEQ ID NO: 16776 - RNA, 23 nt, Artificial Sequence
  Synthetic
cgaaugucgauuugggugcguuc

SEQ ID NO: 16777 - RNA, 24 nt, Artificial Sequence
  Synthetic
gcgaaugucgauuugggugcguuc

SEQ ID NO: 16778 - RNA, 18 nt, Artificial Sequence
  Synthetic
gcgccccguugcguacag

SEQ ID NO: 16779 - RNA, 19 nt, Artificial Sequence
  Synthetic
ggcgccccguugcguacag

SEQ ID NO: 16780 - RNA, 21 nt, Artificial Sequence
  Synthetic
caggcgccccguugcguacag

SEQ ID NO: 16781 - RNA, 22 nt, Artificial Sequence
  Synthetic
ucaggcgccccguugcguacag

SEQ ID NO: 16782 - RNA, 23 nt, Artificial Sequence
  Synthetic
cucaggcgccccguugcguacag

SEQ ID NO: 16783 - RNA, 24 nt, Artificial Sequence
  Synthetic
gcucaggcgccccguugcguacag

SEQ ID NO: 16784 - RNA, 18 nt, Artificial Sequence
  Synthetic
ggguggggagggcaugag

SEQ ID NO: 16785 - RNA, 19 nt, Artificial Sequence
  Synthetic
uggguggggagggcaugag

SEQ ID NO: 16786 - RNA, 21 nt, Artificial Sequence
  Synthetic
cauggguggggagggcaugag

SEQ ID NO: 16787 - RNA, 22 nt, Artificial Sequence
  Synthetic
gcauggguggggagggcaugag

SEQ ID NO: 16788 - RNA, 23 nt, Artificial Sequence
  Synthetic
ggcauggguggggagggcaugag

SEQ ID NO: 16789 - RNA, 24 nt, Artificial Sequence
  Synthetic
gggcauggguggggagggcaugag

SEQ ID NO: 16790 - RNA, 18 nt, Artificial Sequence
  Synthetic
cgagagagcgcuucguag

SEQ ID NO: 16791 - RNA, 19 nt, Artificial Sequence
  Synthetic
acgagagagcgcuucguag

SEQ ID NO: 16792 - RNA, 21 nt, Artificial Sequence
  Synthetic
aaacgagagagcgcuucguag

SEQ ID NO: 16793 - RNA, 22 nt, Artificial Sequence
  Synthetic
gaaacgagagagcgcuucguag

SEQ ID NO: 16794 - RNA, 23 nt, Artificial Sequence
  Synthetic
agaaacgagagagcgcuucguag

SEQ ID NO: 16795 - RNA, 24 nt, Artificial Sequence
  Synthetic
aagaaacgagagagcgcuucguag

SEQ ID NO: 16796 - RNA, 18 nt, Artificial Sequence
  Synthetic
cguacagcgggggggccg

SEQ ID NO: 16797 - RNA, 19 nt, Artificial Sequence
  Synthetic
gcguacagcgggggggccg

SEQ ID NO: 16798 - RNA, 21 nt, Artificial Sequence
  Synthetic
uugcguacagcgggggggccg

SEQ ID NO: 16799 - RNA, 22 nt, Artificial Sequence
  Synthetic
guugcguacagcgggggggccg

SEQ ID NO: 16800 - RNA, 23 nt, Artificial Sequence
  Synthetic
cguugcguacagcgggggggccg

SEQ ID NO: 16801 - RNA, 24 nt, Artificial Sequence
  Synthetic
ccguugcguacagcgggggggccg

SEQ ID NO: 16802 - RNA, 18 nt, Artificial Sequence
  Synthetic
cgcggguggccggaagcg

SEQ ID NO: 16803 - RNA, 19 nt, Artificial Sequence
  Synthetic
ucgcggguggccggaagcg

SEQ ID NO: 16804 - RNA, 21 nt, Artificial Sequence
  Synthetic
cgucgcggguggccggaagcg

SEQ ID NO: 16805 - RNA, 22 nt, Artificial Sequence
  Synthetic
ccgucgcggguggccggaagcg

SEQ ID NO: 16806 - RNA, 23 nt, Artificial Sequence
  Synthetic
gccgucgcggguggccggaagcg

SEQ ID NO: 16807 - RNA, 24 nt, Artificial Sequence
  Synthetic
ggccgucgcggguggccggaagcg

SEQ ID NO: 16808 - RNA, 18 nt, Artificial Sequence
  Synthetic
gccccguugcguacagcg

SEQ ID NO: 16809 - RNA, 19 nt, Artificial Sequence
  Synthetic
cgccccguugcguacagcg

SEQ ID NO: 16810 - RNA, 21 nt, Artificial Sequence
  Synthetic
ggcgccccguugcguacagcg

SEQ ID NO: 16811 - RNA, 22 nt, Artificial Sequence
  Synthetic
aggcgccccguugcguacagcg

SEQ ID NO: 16812 - RNA, 23 nt, Artificial Sequence
  Synthetic
caggcgccccguugcguacagcg

SEQ ID NO: 16813 - RNA, 24 nt, Artificial Sequence
  Synthetic
ucaggcgccccguugcguacagcg

SEQ ID NO: 16814 - RNA, 18 nt, Artificial Sequence
  Synthetic
cgagcaugguacauagcg

SEQ ID NO: 16815 - RNA, 19 nt, Artificial Sequence
  Synthetic
ucgagcaugguacauagcg

SEQ ID NO: 16816 - RNA, 21 nt, Artificial Sequence
  Synthetic
uaucgagcaugguacauagcg

SEQ ID NO: 16817 - RNA, 22 nt, Artificial Sequence
  Synthetic
guaucgagcaugguacauagcg

SEQ ID NO: 16818 - RNA, 23 nt, Artificial Sequence
  Synthetic
gguaucgagcaugguacauagcg

SEQ ID NO: 16819 - RNA, 24 nt, Artificial Sequence
  Synthetic
agguaucgagcaugguacauagcg

SEQ ID NO: 16820 - RNA, 18 nt, Artificial Sequence
  Synthetic
cggcguuggucgguagcg

SEQ ID NO: 16821 - RNA, 19 nt, Artificial Sequence
  Synthetic
ucggcguuggucgguagcg

SEQ ID NO: 16822 - RNA, 21 nt, Artificial Sequence
  Synthetic
ggucggcguuggucgguagcg

SEQ ID NO: 16823 - RNA, 22 nt, Artificial Sequence
  Synthetic
aggucggcguuggucgguagcg

SEQ ID NO: 16824 - RNA, 23 nt, Artificial Sequence
  Synthetic
caggucggcguuggucgguagcg

SEQ ID NO: 16825 - RNA, 24 nt, Artificial Sequence
  Synthetic
acaggucggcguuggucgguagcg

SEQ ID NO: 16826 - RNA, 18 nt, Artificial Sequence
  Synthetic
cgguuaaagagggcggcg

SEQ ID NO: 16827 - RNA, 19 nt, Artificial Sequence
  Synthetic
acgguuaaagagggcggcg

SEQ ID NO: 16828 - RNA, 21 nt, Artificial Sequence
  Synthetic
agacgguuaaagagggcggcg

SEQ ID NO: 16829 - RNA, 22 nt, Artificial Sequence
  Synthetic
gagacgguuaaagagggcggcg

SEQ ID NO: 16830 - RNA, 23 nt, Artificial Sequence
  Synthetic
ggagacgguuaaagagggcggcg

SEQ ID NO: 16831 - RNA, 24 nt, Artificial Sequence
  Synthetic
aggagacgguuaaagagggcggcg

SEQ ID NO: 16832 - RNA, 18 nt, Artificial Sequence
  Synthetic
cgcgcccguagcucggcg

SEQ ID NO: 16833 - RNA, 19 nt, Artificial Sequence
  Synthetic
ccgcgcccguagcucggcg

SEQ ID NO: 16834 - RNA, 21 nt, Artificial Sequence
  Synthetic
ucccgcgcccguagcucggcg

SEQ ID NO: 16835 - RNA, 22 nt, Artificial Sequence
  Synthetic
cucccgcgcccguagcucggcg

SEQ ID NO: 16836 - RNA, 23 nt, Artificial Sequence
  Synthetic
ccucccgcgcccguagcucggcg

SEQ ID NO: 16837 - RNA, 24 nt, Artificial Sequence
  Synthetic
uccucccgcgcccguagcucggcg

SEQ ID NO: 16838 - RNA, 18 nt, Artificial Sequence
  Synthetic
agacgguuaaagagggcg

SEQ ID NO: 16839 - RNA, 19 nt, Artificial Sequence
  Synthetic
gagacgguuaaagagggcg

SEQ ID NO: 16840 - RNA, 21 nt, Artificial Sequence
  Synthetic
aggagacgguuaaagagggcg

SEQ ID NO: 16841 - RNA, 22 nt, Artificial Sequence
  Synthetic
gaggagacgguuaaagagggcg

SEQ ID NO: 16842 - RNA, 23 nt, Artificial Sequence
  Synthetic
cgaggagacgguuaaagagggcg

SEQ ID NO: 16843 - RNA, 24 nt, Artificial Sequence
  Synthetic
ucgaggagacgguuaaagagggcg

SEQ ID NO: 16844 - RNA, 18 nt, Artificial Sequence
  Synthetic
gggacccccggccgggcg

SEQ ID NO: 16845 - RNA, 19 nt, Artificial Sequence
  Synthetic
ugggacccccggccgggcg

SEQ ID NO: 16846 - RNA, 21 nt, Artificial Sequence
  Synthetic
uuugggacccccggccgggcg

SEQ ID NO: 16847 - RNA, 22 nt, Artificial Sequence
  Synthetic
uuuugggacccccggccgggcg

SEQ ID NO: 16848 - RNA, 23 nt, Artificial Sequence
  Synthetic
uuuuugggacccccggccgggcg

SEQ ID NO: 16849 - RNA, 24 nt, Artificial Sequence
  Synthetic
guuuuugggacccccggccgggcg

SEQ ID NO: 16850 - RNA, 18 nt, Artificial Sequence
  Synthetic
ccccauuccaccacaucg

SEQ ID NO: 16851 - RNA, 19 nt, Artificial Sequence
  Synthetic
cccccauuccaccacaucg

SEQ ID NO: 16852 - RNA, 21 nt, Artificial Sequence
  Synthetic
uccccccauuccaccacaucg

SEQ ID NO: 16853 - RNA, 22 nt, Artificial Sequence
  Synthetic
guccccccauuccaccacaucg

SEQ ID NO: 16854 - RNA, 23 nt, Artificial Sequence
  Synthetic
cguccccccauuccaccacaucg

SEQ ID NO: 16855 - RNA, 24 nt, Artificial Sequence
  Synthetic
gcguccccccauuccaccacaucg

SEQ ID NO: 16856 - RNA, 18 nt, Artificial Sequence
  Synthetic
gcgcuaaagcccaagucg

SEQ ID NO: 16857 - RNA, 19 nt, Artificial Sequence
  Synthetic
cgcgcuaaagcccaagucg

SEQ ID NO: 16858 - RNA, 21 nt, Artificial Sequence
  Synthetic
cccgcgcuaaagcccaagucg

SEQ ID NO: 16859 - RNA, 22 nt, Artificial Sequence
  Synthetic
gcccgcgcuaaagcccaagucg

SEQ ID NO: 16860 - RNA, 23 nt, Artificial Sequence
  Synthetic
ggcccgcgcuaaagcccaagucg

SEQ ID NO: 16861 - RNA, 24 nt, Artificial Sequence
  Synthetic
gggcccgcgcuaaagcccaagucg

SEQ ID NO: 16862 - RNA, 18 nt, Artificial Sequence
  Synthetic
cuaaagcccaagucgucg

SEQ ID NO: 16863 - RNA, 19 nt, Artificial Sequence
  Synthetic
gcuaaagcccaagucgucg

SEQ ID NO: 16864 - RNA, 21 nt, Artificial Sequence
  Synthetic
gcgcuaaagcccaagucgucg

SEQ ID NO: 16865 - RNA, 22 nt, Artificial Sequence
  Synthetic
cgcgcuaaagcccaagucgucg

SEQ ID NO: 16866 - RNA, 23 nt, Artificial Sequence
  Synthetic
ccgcgcuaaagcccaagucgucg

SEQ ID NO: 16867 - RNA, 24 nt, Artificial Sequence
  Synthetic
cccgcgcuaaagcccaagucgucg

SEQ ID NO: 16868 - RNA, 18 nt, Artificial Sequence
  Synthetic
uguuuuugggacccccgg

SEQ ID NO: 16869 - RNA, 19 nt, Artificial Sequence
  Synthetic
guguuuuugggacccccgg

SEQ ID NO: 16870 - RNA, 21 nt, Artificial Sequence
  Synthetic
ggguguuuuugggacccccgg

SEQ ID NO: 16871 - RNA, 22 nt, Artificial Sequence
  Synthetic
gggguguuuuugggacccccgg

SEQ ID NO: 16872 - RNA, 23 nt, Artificial Sequence
  Synthetic
cgggguguuuuugggacccccgg

SEQ ID NO: 16873 - RNA, 24 nt, Artificial Sequence
  Synthetic
ccgggguguuuuugggacccccgg

SEQ ID NO: 16874 - RNA, 18 nt, Artificial Sequence
  Synthetic
uuugggacccccggccgg

SEQ ID NO: 16875 - RNA, 19 nt, Artificial Sequence
  Synthetic
uuuugggacccccggccgg

SEQ ID NO: 16876 - RNA, 21 nt, Artificial Sequence
  Synthetic
guuuuugggacccccggccgg

SEQ ID NO: 16877 - RNA, 22 nt, Artificial Sequence
  Synthetic
uguuuuugggacccccggccgg

SEQ ID NO: 16878 - RNA, 23 nt, Artificial Sequence
  Synthetic
guguuuuugggacccccggccgg

SEQ ID NO: 16879 - RNA, 24 nt, Artificial Sequence
  Synthetic
gguguuuuugggacccccggccgg

SEQ ID NO: 16880 - RNA, 18 nt, Artificial Sequence
  Synthetic
ccccguugcguacagcgg

SEQ ID NO: 16881 - RNA, 19 nt, Artificial Sequence
  Synthetic
gccccguugcguacagcgg

SEQ ID NO: 16882 - RNA, 21 nt, Artificial Sequence
  Synthetic
gcgccccguugcguacagcgg

SEQ ID NO: 16883 - RNA, 22 nt, Artificial Sequence
  Synthetic
ggcgccccguugcguacagcgg

SEQ ID NO: 16884 - RNA, 23 nt, Artificial Sequence
  Synthetic
aggcgccccguugcguacagcgg

SEQ ID NO: 16885 - RNA, 24 nt, Artificial Sequence
  Synthetic
caggcgccccguugcguacagcgg

SEQ ID NO: 16886 - RNA, 18 nt, Artificial Sequence
  Synthetic
gguuaaagagggcggcgg

SEQ ID NO: 16887 - RNA, 19 nt, Artificial Sequence
  Synthetic
cgguuaaagagggcggcgg

SEQ ID NO: 16888 - RNA, 21 nt, Artificial Sequence
  Synthetic
gacgguuaaagagggcggcgg

SEQ ID NO: 16889 - RNA, 22 nt, Artificial Sequence
  Synthetic
agacgguuaaagagggcggcgg

SEQ ID NO: 16890 - RNA, 23 nt, Artificial Sequence
  Synthetic
gagacgguuaaagagggcggcgg

SEQ ID NO: 16891 - RNA, 24 nt, Artificial Sequence
  Synthetic
ggagacgguuaaagagggcggcgg

SEQ ID NO: 16892 - RNA, 18 nt, Artificial Sequence
  Synthetic
gacgguuaaagagggcgg

SEQ ID NO: 16893 - RNA, 19 nt, Artificial Sequence
  Synthetic
agacgguuaaagagggcgg

SEQ ID NO: 16894 - RNA, 21 nt, Artificial Sequence
  Synthetic
ggagacgguuaaagagggcgg

SEQ ID NO: 16895 - RNA, 22 nt, Artificial Sequence
  Synthetic
aggagacgguuaaagagggcgg

SEQ ID NO: 16896 - RNA, 23 nt, Artificial Sequence
  Synthetic
gaggagacgguuaaagagggcgg

SEQ ID NO: 16897 - RNA, 24 nt, Artificial Sequence
  Synthetic
cgaggagacgguuaaagagggcgg

SEQ ID NO: 16898 - RNA, 18 nt, Artificial Sequence
  Synthetic
ggacccccggccgggcgg

SEQ ID NO: 16899 - RNA, 19 nt, Artificial Sequence
  Synthetic
gggacccccggccgggcgg

SEQ ID NO: 16900 - RNA, 21 nt, Artificial Sequence
  Synthetic
uugggacccccggccgggcgg

SEQ ID NO: 16901 - RNA, 22 nt, Artificial Sequence
  Synthetic
uuugggacccccggccgggcgg

SEQ ID NO: 16902 - RNA, 23 nt, Artificial Sequence
  Synthetic
uuuugggacccccggccgggcgg

SEQ ID NO: 16903 - RNA, 24 nt, Artificial Sequence
  Synthetic
uuuuugggacccccggccgggcgg

SEQ ID NO: 16904 - RNA, 18 nt, Artificial Sequence
  Synthetic
uugggacccccggccggg

SEQ ID NO: 16905 - RNA, 19 nt, Artificial Sequence
  Synthetic
uuugggacccccggccggg

SEQ ID NO: 16906 - RNA, 21 nt, Artificial Sequence
  Synthetic
uuuuugggacccccggccggg

SEQ ID NO: 16907 - RNA, 22 nt, Artificial Sequence
  Synthetic
guuuuugggacccccggccggg

SEQ ID NO: 16908 - RNA, 23 nt, Artificial Sequence
  Synthetic
uguuuuugggacccccggccggg

SEQ ID NO: 16909 - RNA, 24 nt, Artificial Sequence
  Synthetic
guguuuuugggacccccggccggg

SEQ ID NO: 16910 - RNA, 18 nt, Artificial Sequence
  Synthetic
guuaaagagggcggcggg

SEQ ID NO: 16911 - RNA, 19 nt, Artificial Sequence
  Synthetic
gguuaaagagggcggcggg

SEQ ID NO: 16912 - RNA, 21 nt, Artificial Sequence
  Synthetic
acgguuaaagagggcggcggg

SEQ ID NO: 16913 - RNA, 22 nt, Artificial Sequence
  Synthetic
gacgguuaaagagggcggcggg

SEQ ID NO: 16914 - RNA, 23 nt, Artificial Sequence
  Synthetic
agacgguuaaagagggcggcggg

SEQ ID NO: 16915 - RNA, 24 nt, Artificial Sequence
  Synthetic
gagacgguuaaagagggcggcggg

SEQ ID NO: 16916 - RNA, 18 nt, Artificial Sequence
  Synthetic
aagagggcggcggggggg

SEQ ID NO: 16917 - RNA, 19 nt, Artificial Sequence
  Synthetic
aaagagggcggcggggggg

SEQ ID NO: 16918 - RNA, 21 nt, Artificial Sequence
  Synthetic
uuaaagagggcggcggggggg

SEQ ID NO: 16919 - RNA, 22 nt, Artificial Sequence
  Synthetic
guuaaagagggcggcggggggg

SEQ ID NO: 16920 - RNA, 23 nt, Artificial Sequence
  Synthetic
gguuaaagagggcggcggggggg

SEQ ID NO: 16921 - RNA, 24 nt, Artificial Sequence
  Synthetic
cgguuaaagagggcggcggggggg

SEQ ID NO: 16922 - RNA, 18 nt, Artificial Sequence
  Synthetic
gggggggacgggcauggg

SEQ ID NO: 16923 - RNA, 19 nt, Artificial Sequence
  Synthetic
cgggggggacgggcauggg

SEQ ID NO: 16924 - RNA, 21 nt, Artificial Sequence
  Synthetic
ggcgggggggacgggcauggg

SEQ ID NO: 16925 - RNA, 22 nt, Artificial Sequence
  Synthetic
cggcgggggggacgggcauggg

SEQ ID NO: 16926 - RNA, 23 nt, Artificial Sequence
  Synthetic
gcggcgggggggacgggcauggg

SEQ ID NO: 16927 - RNA, 24 nt, Artificial Sequence
  Synthetic
ggcggcgggggggacgggcauggg

SEQ ID NO: 16928 - RNA, 18 nt, Artificial Sequence
  Synthetic
gggacgggcauggguggg

SEQ ID NO: 16929 - RNA, 19 nt, Artificial Sequence
  Synthetic
ggggacgggcauggguggg

SEQ ID NO: 16930 - RNA, 21 nt, Artificial Sequence
  Synthetic
ggggggacgggcauggguggg

SEQ ID NO: 16931 - RNA, 22 nt, Artificial Sequence
  Synthetic
gggggggacgggcauggguggg

SEQ ID NO: 16932 - RNA, 23 nt, Artificial Sequence
  Synthetic
cgggggggacgggcauggguggg

SEQ ID NO: 16933 - RNA, 24 nt, Artificial Sequence
  Synthetic
gcgggggggacgggcauggguggg

SEQ ID NO: 16934 - RNA, 18 nt, Artificial Sequence
  Synthetic
cgggggggacgggcaugg

SEQ ID NO: 16935 - RNA, 19 nt, Artificial Sequence
  Synthetic
gcgggggggacgggcaugg

SEQ ID NO: 16936 - RNA, 21 nt, Artificial Sequence
  Synthetic
cggcgggggggacgggcaugg

SEQ ID NO: 16937 - RNA, 22 nt, Artificial Sequence
  Synthetic
gcggcgggggggacgggcaugg

SEQ ID NO: 16938 - RNA, 23 nt, Artificial Sequence
  Synthetic
ggcggcgggggggacgggcaugg

SEQ ID NO: 16939 - RNA, 24 nt, Artificial Sequence
  Synthetic
gggcggcgggggggacgggcaugg

SEQ ID NO: 16940 - RNA, 18 nt, Artificial Sequence
  Synthetic
gcccguagcucggcgugg

SEQ ID NO: 16941 - RNA, 19 nt, Artificial Sequence
  Synthetic
cgcccguagcucggcgugg

SEQ ID NO: 16942 - RNA, 21 nt, Artificial Sequence
  Synthetic
cgcgcccguagcucggcgugg

SEQ ID NO: 16943 - RNA, 22 nt, Artificial Sequence
  Synthetic
ccgcgcccguagcucggcgugg

SEQ ID NO: 16944 - RNA, 23 nt, Artificial Sequence
  Synthetic
cccgcgcccguagcucggcgugg

SEQ ID NO: 16945 - RNA, 24 nt, Artificial Sequence
  Synthetic
ucccgcgcccguagcucggcgugg

SEQ ID NO: 16946 - RNA, 18 nt, Artificial Sequence
  Synthetic
cgaggccgucgcgggugg

SEQ ID NO: 16947 - RNA, 19 nt, Artificial Sequence
  Synthetic
ccgaggccgucgcgggugg

SEQ ID NO: 16948 - RNA, 21 nt, Artificial Sequence
  Synthetic
gcccgaggccgucgcgggugg

SEQ ID NO: 16949 - RNA, 22 nt, Artificial Sequence
  Synthetic
agcccgaggccgucgcgggugg

SEQ ID NO: 16950 - RNA, 23 nt, Artificial Sequence
  Synthetic
gagcccgaggccgucgcgggugg

SEQ ID NO: 16951 - RNA, 24 nt, Artificial Sequence
  Synthetic
agagcccgaggccgucgcgggugg

SEQ ID NO: 16952 - RNA, 18 nt, Artificial Sequence
  Synthetic
gaccaagagguccauugg

SEQ ID NO: 16953 - RNA, 19 nt, Artificial Sequence
  Synthetic
cgaccaagagguccauugg

SEQ ID NO: 16954 - RNA, 20 nt, Artificial Sequence
  Synthetic
ucgaccaagagguccauugg

SEQ ID NO: 16955 - RNA, 21 nt, Artificial Sequence
  Synthetic
gucgaccaagagguccauugg

SEQ ID NO: 16956 - RNA, 22 nt, Artificial Sequence
  Synthetic
cgucgaccaagagguccauugg

SEQ ID NO: 16957 - RNA, 23 nt, Artificial Sequence
  Synthetic
ucgucgaccaagagguccauugg

SEQ ID NO: 16958 - RNA, 24 nt, Artificial Sequence
  Synthetic
cucgucgaccaagagguccauugg

SEQ ID NO: 16959 - RNA, 18 nt, Artificial Sequence
  Synthetic
ccgggcgggggggcggug

SEQ ID NO: 16960 - RNA, 19 nt, Artificial Sequence
  Synthetic
gccgggcgggggggcggug

SEQ ID NO: 16961 - RNA, 21 nt, Artificial Sequence
  Synthetic
cggccgggcgggggggcggug

SEQ ID NO: 16962 - RNA, 22 nt, Artificial Sequence
  Synthetic
ccggccgggcgggggggcggug

SEQ ID NO: 16963 - RNA, 23 nt, Artificial Sequence
  Synthetic
cccggccgggcgggggggcggug

SEQ ID NO: 16964 - RNA, 24 nt, Artificial Sequence
  Synthetic
ccccggccgggcgggggggcggug

SEQ ID NO: 16965 - RNA, 18 nt, Artificial Sequence
  Synthetic
gggggacgggcaugggug

SEQ ID NO: 16966 - RNA, 19 nt, Artificial Sequence
  Synthetic
ggggggacgggcaugggug

SEQ ID NO: 16967 - RNA, 21 nt, Artificial Sequence
  Synthetic
cgggggggacgggcaugggug

SEQ ID NO: 16968 - RNA, 22 nt, Artificial Sequence
  Synthetic
gcgggggggacgggcaugggug

SEQ ID NO: 16969 - RNA, 23 nt, Artificial Sequence
  Synthetic
ggcgggggggacgggcaugggug

SEQ ID NO: 16970 - RNA, 24 nt, Artificial Sequence
  Synthetic
cggcgggggggacgggcaugggug

SEQ ID NO: 16971 - RNA, 18 nt, Artificial Sequence
  Synthetic
ccauugggugggguugau

SEQ ID NO: 16972 - RNA, 19 nt, Artificial Sequence
  Synthetic
uccauugggugggguugau

SEQ ID NO: 16973 - RNA, 20 nt, Artificial Sequence
  Synthetic
guccauugggugggguugau

SEQ ID NO: 16974 - RNA, 21 nt, Artificial Sequence
  Synthetic
gguccauugggugggguugau

SEQ ID NO: 16975 - RNA, 22 nt, Artificial Sequence
  Synthetic
agguccauugggugggguugau

SEQ ID NO: 16976 - RNA, 23 nt, Artificial Sequence
  Synthetic
gagguccauugggugggguugau

SEQ ID NO: 16977 - RNA, 24 nt, Artificial Sequence
  Synthetic
agagguccauugggugggguugau

SEQ ID NO: 16978 - RNA, 18 nt, Artificial Sequence
  Synthetic
gcggguggccggaagcgu

SEQ ID NO: 16979 - RNA, 19 nt, Artificial Sequence
  Synthetic
cgcggguggccggaagcgu

SEQ ID NO: 16980 - RNA, 21 nt, Artificial Sequence
  Synthetic
gucgcggguggccggaagcgu

SEQ ID NO: 16981 - RNA, 22 nt, Artificial Sequence
  Synthetic
cgucgcggguggccggaagcgu

SEQ ID NO: 16982 - RNA, 23 nt, Artificial Sequence
  Synthetic
ccgucgcggguggccggaagcgu

SEQ ID NO: 16983 - RNA, 24 nt, Artificial Sequence
  Synthetic
gccgucgcggguggccggaagcgu

SEQ ID NO: 16984 - RNA, 18 nt, Artificial Sequence
  Synthetic
augucgauuugggugcgu

SEQ ID NO: 16985 - RNA, 19 nt, Artificial Sequence
  Synthetic
aaugucgauuugggugcgu

SEQ ID NO: 16986 - RNA, 21 nt, Artificial Sequence
  Synthetic
cgaaugucgauuugggugcgu

SEQ ID NO: 16987 - RNA, 22 nt, Artificial Sequence
  Synthetic
gcgaaugucgauuugggugcgu

SEQ ID NO: 16988 - RNA, 23 nt, Artificial Sequence
  Synthetic
cgcgaaugucgauuugggugcgu

SEQ ID NO: 16989 - RNA, 24 nt, Artificial Sequence
  Synthetic
gcgcgaaugucgauuugggugcgu

SEQ ID NO: 16990 - RNA, 18 nt, Artificial Sequence
  Synthetic
ggggggacgggcaugggu

SEQ ID NO: 16991 - RNA, 19 nt, Artificial Sequence
  Synthetic
gggggggacgggcaugggu

SEQ ID NO: 16992 - RNA, 21 nt, Artificial Sequence
  Synthetic
gcgggggggacgggcaugggu

SEQ ID NO: 16993 - RNA, 22 nt, Artificial Sequence
  Synthetic
ggcgggggggacgggcaugggu

SEQ ID NO: 16994 - RNA, 23 nt, Artificial Sequence
  Synthetic
cggcgggggggacgggcaugggu

SEQ ID NO: 16995 - RNA, 24 nt, Artificial Sequence
  Synthetic
gcggcgggggggacgggcaugggu

SEQ ID NO: 16996 - RNA, 18 nt, Artificial Sequence
  Synthetic
ugucgauuugggugcguu

SEQ ID NO: 16997 - RNA, 19 nt, Artificial Sequence
  Synthetic
augucgauuugggugcguu

SEQ ID NO: 16998 - RNA, 21 nt, Artificial Sequence
  Synthetic
gaaugucgauuugggugcguu

SEQ ID NO: 16999 - RNA, 22 nt, Artificial Sequence
  Synthetic
cgaaugucgauuugggugcguu

SEQ ID NO: 17000 - RNA, 23 nt, Artificial Sequence
  Synthetic
gcgaaugucgauuugggugcguu

SEQ ID NO: 17001 - RNA, 24 nt, Artificial Sequence
  Synthetic
cgcgaaugucgauuugggugcguu

SEQ ID NO: 17002 - RNA, 18 nt, Artificial Sequence
  Synthetic
ggggccgccgggguguuu

SEQ ID NO: 17003 - RNA, 19 nt, Artificial Sequence
  Synthetic
gggggccgccgggguguuu

SEQ ID NO: 17004 - RNA, 21 nt, Artificial Sequence
  Synthetic
gggggggccgccgggguguuu

SEQ ID NO: 17005 - RNA, 22 nt, Artificial Sequence
  Synthetic
cgggggggccgccgggguguuu

SEQ ID NO: 17006 - RNA, 23 nt, Artificial Sequence
  Synthetic
gcgggggggccgccgggguguuu

SEQ ID NO: 17007 - RNA, 24 nt, Artificial Sequence
  Synthetic
agcgggggggccgccgggguguuu

SEQ ID NO: 17008 - RNA, 18 nt, Artificial Sequence
  Synthetic
gggccgccgggguguuuu

SEQ ID NO: 17009 - RNA, 19 nt, Artificial Sequence
  Synthetic
ggggccgccgggguguuuu

SEQ ID NO: 17010 - RNA, 21 nt, Artificial Sequence
  Synthetic
ggggggccgccgggguguuuu

SEQ ID NO: 17011 - RNA, 22 nt, Artificial Sequence
  Synthetic
gggggggccgccgggguguuuu

SEQ ID NO: 17012 - RNA, 23 nt, Artificial Sequence
  Synthetic
cgggggggccgccgggguguuuu

SEQ ID NO: 17013 - RNA, 24 nt, Artificial Sequence
  Synthetic
gcgggggggccgccgggguguuuu

SEQ ID NO: 17014 - RNA, 18 nt, Artificial Sequence
  Synthetic
cccccccgcuguacgcaa

SEQ ID NO: 17015 - RNA, 19 nt, Artificial Sequence
  Synthetic
gcccccccgcuguacgcaa

SEQ ID NO: 17016 - RNA, 21 nt, Artificial Sequence
  Synthetic
cggcccccccgcuguacgcaa

SEQ ID NO: 17017 - RNA, 22 nt, Artificial Sequence
  Synthetic
gcggcccccccgcuguacgcaa

SEQ ID NO: 17018 - RNA, 23 nt, Artificial Sequence
  Synthetic
ggcggcccccccgcuguacgcaa

SEQ ID NO: 17019 - RNA, 24 nt, Artificial Sequence
  Synthetic
cggcggcccccccgcuguacgcaa

SEQ ID NO: 17020 - RNA, 18 nt, Artificial Sequence
  Synthetic
cccagcgaugugguggaa

SEQ ID NO: 17021 - RNA, 19 nt, Artificial Sequence
  Synthetic
gcccagcgaugugguggaa

SEQ ID NO: 17022 - RNA, 21 nt, Artificial Sequence
  Synthetic
cugcccagcgaugugguggaa

SEQ ID NO: 17023 - RNA, 22 nt, Artificial Sequence
  Synthetic
gcugcccagcgaugugguggaa

SEQ ID NO: 17024 - RNA, 23 nt, Artificial Sequence
  Synthetic
cgcugcccagcgaugugguggaa

SEQ ID NO: 17025 - RNA, 24 nt, Artificial Sequence
  Synthetic
acgcugcccagcgaugugguggaa

SEQ ID NO: 17026 - RNA, 18 nt, Artificial Sequence
  Synthetic
ccguaucaaccccaccca

SEQ ID NO: 17027 - RNA, 19 nt, Artificial Sequence
  Synthetic
cccguaucaaccccaccca

SEQ ID NO: 17028 - RNA, 20 nt, Artificial Sequence
  Synthetic
ucccguaucaaccccaccca

SEQ ID NO: 17029 - RNA, 21 nt, Artificial Sequence
  Synthetic
uucccguaucaaccccaccca

SEQ ID NO: 17030 - RNA, 22 nt, Artificial Sequence
  Synthetic
uuucccguaucaaccccaccca

SEQ ID NO: 17031 - RNA, 23 nt, Artificial Sequence
  Synthetic
cuuucccguaucaaccccaccca

SEQ ID NO: 17032 - RNA, 24 nt, Artificial Sequence
  Synthetic
ucuuucccguaucaaccccaccca

SEQ ID NO: 17033 - RNA, 18 nt, Artificial Sequence
  Synthetic
gcccccccgcuguacgca

SEQ ID NO: 17034 - RNA, 19 nt, Artificial Sequence
  Synthetic
ggcccccccgcuguacgca

SEQ ID NO: 17035 - RNA, 21 nt, Artificial Sequence
  Synthetic
gcggcccccccgcuguacgca

SEQ ID NO: 17036 - RNA, 22 nt, Artificial Sequence
  Synthetic
ggcggcccccccgcuguacgca

SEQ ID NO: 17037 - RNA, 23 nt, Artificial Sequence
  Synthetic
cggcggcccccccgcuguacgca

SEQ ID NO: 17038 - RNA, 24 nt, Artificial Sequence
  Synthetic
ccggcggcccccccgcuguacgca

SEQ ID NO: 17039 - RNA, 18 nt, Artificial Sequence
  Synthetic
ccaugcucgauaccugga

SEQ ID NO: 17040 - RNA, 19 nt, Artificial Sequence
  Synthetic
accaugcucgauaccugga

SEQ ID NO: 17041 - RNA, 21 nt, Artificial Sequence
  Synthetic
guaccaugcucgauaccugga

SEQ ID NO: 17042 - RNA, 22 nt, Artificial Sequence
  Synthetic
uguaccaugcucgauaccugga

SEQ ID NO: 17043 - RNA, 23 nt, Artificial Sequence
  Synthetic
auguaccaugcucgauaccugga

SEQ ID NO: 17044 - RNA, 24 nt, Artificial Sequence
  Synthetic
uauguaccaugcucgauaccugga

SEQ ID NO: 17045 - RNA, 18 nt, Artificial Sequence
  Synthetic
gcccagcgauguggugga

SEQ ID NO: 17046 - RNA, 19 nt, Artificial Sequence
  Synthetic
ugcccagcgauguggugga

SEQ ID NO: 17047 - RNA, 21 nt, Artificial Sequence
  Synthetic
gcugcccagcgauguggugga

SEQ ID NO: 17048 - RNA, 22 nt, Artificial Sequence
  Synthetic
cgcugcccagcgauguggugga

SEQ ID NO: 17049 - RNA, 23 nt, Artificial Sequence
  Synthetic
acgcugcccagcgauguggugga

SEQ ID NO: 17050 - RNA, 24 nt, Artificial Sequence
  Synthetic
aacgcugcccagcgauguggugga

SEQ ID NO: 17051 - RNA, 18 nt, Artificial Sequence
  Synthetic
ggcgcgggaggagagcua

SEQ ID NO: 17052 - RNA, 19 nt, Artificial Sequence
  Synthetic
gggcgcgggaggagagcua

SEQ ID NO: 17053 - RNA, 20 nt, Artificial Sequence
  Synthetic
cgggcgcgggaggagagcua

SEQ ID NO: 17054 - RNA, 21 nt, Artificial Sequence
  Synthetic
acgggcgcgggaggagagcua

SEQ ID NO: 17055 - RNA, 22 nt, Artificial Sequence
  Synthetic
uacgggcgcgggaggagagcua

SEQ ID NO: 17056 - RNA, 23 nt, Artificial Sequence
  Synthetic
cuacgggcgcgggaggagagcua

SEQ ID NO: 17057 - RNA, 24 nt, Artificial Sequence
  Synthetic
gcuacgggcgcgggaggagagcua

SEQ ID NO: 17058 - RNA, 18 nt, Artificial Sequence
  Synthetic
gaccaacgccgaccugua

SEQ ID NO: 17059 - RNA, 19 nt, Artificial Sequence
  Synthetic
cgaccaacgccgaccugua

SEQ ID NO: 17060 - RNA, 21 nt, Artificial Sequence
  Synthetic
accgaccaacgccgaccugua

SEQ ID NO: 17061 - RNA, 22 nt, Artificial Sequence
  Synthetic
uaccgaccaacgccgaccugua

SEQ ID NO: 17062 - RNA, 23 nt, Artificial Sequence
  Synthetic
cuaccgaccaacgccgaccugua

SEQ ID NO: 17063 - RNA, 24 nt, Artificial Sequence
  Synthetic
gcuaccgaccaacgccgaccugua

SEQ ID NO: 17064 - RNA, 18 nt, Artificial Sequence
  Synthetic
cuguuugccgacaugaac

SEQ ID NO: 17065 - RNA, 19 nt, Artificial Sequence
  Synthetic
gcuguuugccgacaugaac

SEQ ID NO: 17066 - RNA, 21 nt, Artificial Sequence
  Synthetic
gagcuguuugccgacaugaac

SEQ ID NO: 17067 - RNA, 22 nt, Artificial Sequence
  Synthetic
cgagcuguuugccgacaugaac

SEQ ID NO: 17068 - RNA, 23 nt, Artificial Sequence
  Synthetic
acgagcuguuugccgacaugaac

SEQ ID NO: 17069 - RNA, 24 nt, Artificial Sequence
  Synthetic
gacgagcuguuugccgacaugaac

SEQ ID NO: 17070 - RNA, 18 nt, Artificial Sequence
  Synthetic
aaccgucuccucgacgac

SEQ ID NO: 17071 - RNA, 19 nt, Artificial Sequence
  Synthetic
uaaccgucuccucgacgac

SEQ ID NO: 17072 - RNA, 21 nt, Artificial Sequence
  Synthetic
uuuaaccgucuccucgacgac

SEQ ID NO: 17073 - RNA, 22 nt, Artificial Sequence
  Synthetic
cuuuaaccgucuccucgacgac

SEQ ID NO: 17074 - RNA, 23 nt, Artificial Sequence
  Synthetic
ucuuuaaccgucuccucgacgac

SEQ ID NO: 17075 - RNA, 24 nt, Artificial Sequence
  Synthetic
cucuuuaaccgucuccucgacgac

SEQ ID NO: 17076 - RNA, 18 nt, Artificial Sequence
  Synthetic
gacgagcuguuugccgac

SEQ ID NO: 17077 - RNA, 19 nt, Artificial Sequence
  Synthetic
cgacgagcuguuugccgac

SEQ ID NO: 17078 - RNA, 21 nt, Artificial Sequence
  Synthetic
gucgacgagcuguuugccgac

SEQ ID NO: 17079 - RNA, 22 nt, Artificial Sequence
  Synthetic
ggucgacgagcuguuugccgac

SEQ ID NO: 17080 - RNA, 23 nt, Artificial Sequence
  Synthetic
uggucgacgagcuguuugccgac

SEQ ID NO: 17081 - RNA, 24 nt, Artificial Sequence
  Synthetic
uuggucgacgagcuguuugccgac

SEQ ID NO: 17082 - RNA, 18 nt, Artificial Sequence
  Synthetic
auguaccaugcucgauac

SEQ ID NO: 17083 - RNA, 19 nt, Artificial Sequence
  Synthetic
uauguaccaugcucgauac

SEQ ID NO: 17084 - RNA, 21 nt, Artificial Sequence
  Synthetic
gcuauguaccaugcucgauac

SEQ ID NO: 17085 - RNA, 22 nt, Artificial Sequence
  Synthetic
cgcuauguaccaugcucgauac

SEQ ID NO: 17086 - RNA, 23 nt, Artificial Sequence
  Synthetic
gcgcuauguaccaugcucgauac

SEQ ID NO: 17087 - RNA, 24 nt, Artificial Sequence
  Synthetic
cgcgcuauguaccaugcucgauac

SEQ ID NO: 17088 - RNA, 18 nt, Artificial Sequence
  Synthetic
accaacgccgaccuguac

SEQ ID NO: 17089 - RNA, 19 nt, Artificial Sequence
  Synthetic
gaccaacgccgaccuguac

SEQ ID NO: 17090 - RNA, 21 nt, Artificial Sequence
  Synthetic
ccgaccaacgccgaccuguac

SEQ ID NO: 17091 - RNA, 22 nt, Artificial Sequence
  Synthetic
accgaccaacgccgaccuguac

SEQ ID NO: 17092 - RNA, 23 nt, Artificial Sequence
  Synthetic
uaccgaccaacgccgaccuguac

SEQ ID NO: 17093 - RNA, 24 nt, Artificial Sequence
  Synthetic
cuaccgaccaacgccgaccuguac

SEQ ID NO: 17094 - RNA, 18 nt, Artificial Sequence
  Synthetic
uguaccaugcucgauacc

SEQ ID NO: 17095 - RNA, 19 nt, Artificial Sequence
  Synthetic
auguaccaugcucgauacc

SEQ ID NO: 17096 - RNA, 21 nt, Artificial Sequence
  Synthetic
cuauguaccaugcucgauacc

SEQ ID NO: 17097 - RNA, 22 nt, Artificial Sequence
  Synthetic
gcuauguaccaugcucgauacc

SEQ ID NO: 17098 - RNA, 23 nt, Artificial Sequence
  Synthetic
cgcuauguaccaugcucgauacc

SEQ ID NO: 17099 - RNA, 24 nt, Artificial Sequence
  Synthetic
gcgcuauguaccaugcucgauacc

SEQ ID NO: 17100 - RNA, 18 nt, Artificial Sequence
  Synthetic
cggccacccgcgacggcc

SEQ ID NO: 17101 - RNA, 19 nt, Artificial Sequence
  Synthetic
ccggccacccgcgacggcc

SEQ ID NO: 17102 - RNA, 21 nt, Artificial Sequence
  Synthetic
uuccggccacccgcgacggcc

SEQ ID NO: 17103 - RNA, 22 nt, Artificial Sequence
  Synthetic
cuuccggccacccgcgacggcc

SEQ ID NO: 17104 - RNA, 23 nt, Artificial Sequence
  Synthetic
gcuuccggccacccgcgacggcc

SEQ ID NO: 17105 - RNA, 24 nt, Artificial Sequence
  Synthetic
cgcuuccggccacccgcgacggcc

SEQ ID NO: 17106 - RNA, 18 nt, Artificial Sequence
  Synthetic
ggggggacgcguacgucc

SEQ ID NO: 17107 - RNA, 19 nt, Artificial Sequence
  Synthetic
uggggggacgcguacgucc

SEQ ID NO: 17108 - RNA, 21 nt, Artificial Sequence
  Synthetic
aauggggggacgcguacgucc

SEQ ID NO: 17109 - RNA, 22 nt, Artificial Sequence
  Synthetic
gaauggggggacgcguacgucc

SEQ ID NO: 17110 - RNA, 23 nt, Artificial Sequence
  Synthetic
ggaauggggggacgcguacgucc

SEQ ID NO: 17111 - RNA, 24 nt, Artificial Sequence
  Synthetic
uggaauggggggacgcguacgucc

SEQ ID NO: 17112 - RNA, 18 nt, Artificial Sequence
  Synthetic
gacgacuugggcuuuagc

SEQ ID NO: 17113 - RNA, 19 nt, Artificial Sequence
  Synthetic
cgacgacuugggcuuuagc

SEQ ID NO: 17114 - RNA, 21 nt, Artificial Sequence
  Synthetic
cucgacgacuugggcuuuagc

SEQ ID NO: 17115 - RNA, 22 nt, Artificial Sequence
  Synthetic
ccucgacgacuugggcuuuagc

SEQ ID NO: 17116 - RNA, 23 nt, Artificial Sequence
  Synthetic
uccucgacgacuugggcuuuagc

SEQ ID NO: 17117 - RNA, 24 nt, Artificial Sequence
  Synthetic
cuccucgacgacuugggcuuuagc

SEQ ID NO: 17118 - RNA, 18 nt, Artificial Sequence
  Synthetic
acgccgagcuacgggcgc

SEQ ID NO: 17119 - RNA, 19 nt, Artificial Sequence
  Synthetic
cacgccgagcuacgggcgc

SEQ ID NO: 17120 - RNA, 21 nt, Artificial Sequence
  Synthetic
uccacgccgagcuacgggcgc

SEQ ID NO: 17121 - RNA, 22 nt, Artificial Sequence
  Synthetic
uuccacgccgagcuacgggcgc

SEQ ID NO: 17122 - RNA, 23 nt, Artificial Sequence
  Synthetic
cuuccacgccgagcuacgggcgc

SEQ ID NO: 17123 - RNA, 24 nt, Artificial Sequence
  Synthetic
ucuuccacgccgagcuacgggcgc

SEQ ID NO: 17124 - RNA, 18 nt, Artificial Sequence
  Synthetic
cuguacgcaacggggcgc

SEQ ID NO: 17125 - RNA, 19 nt, Artificial Sequence
  Synthetic
gcuguacgcaacggggcgc

SEQ ID NO: 17126 - RNA, 21 nt, Artificial Sequence
  Synthetic
ccgcuguacgcaacggggcgc

SEQ ID NO: 17127 - RNA, 22 nt, Artificial Sequence
  Synthetic
cccgcuguacgcaacggggcgc

SEQ ID NO: 17128 - RNA, 23 nt, Artificial Sequence
  Synthetic
ccccgcuguacgcaacggggcgc

SEQ ID NO: 17129 - RNA, 24 nt, Artificial Sequence
  Synthetic
cccccgcuguacgcaacggggcgc

SEQ ID NO: 17130 - RNA, 18 nt, Artificial Sequence
  Synthetic
accgcccccccgcccggc

SEQ ID NO: 17131 - RNA, 19 nt, Artificial Sequence
  Synthetic
caccgcccccccgcccggc

SEQ ID NO: 17132 - RNA, 21 nt, Artificial Sequence
  Synthetic
gccaccgcccccccgcccggc

SEQ ID NO: 17133 - RNA, 22 nt, Artificial Sequence
  Synthetic
cgccaccgcccccccgcccggc

SEQ ID NO: 17134 - RNA, 23 nt, Artificial Sequence
  Synthetic
ucgccaccgcccccccgcccggc

SEQ ID NO: 17135 - RNA, 24 nt, Artificial Sequence
  Synthetic
uucgccaccgcccccccgcccggc

SEQ ID NO: 17136 - RNA, 18 nt, Artificial Sequence
  Synthetic
ccacgccgagcuacgggc

SEQ ID NO: 17137 - RNA, 19 nt, Artificial Sequence
  Synthetic
uccacgccgagcuacgggc

SEQ ID NO: 17138 - RNA, 21 nt, Artificial Sequence
  Synthetic
cuuccacgccgagcuacgggc

SEQ ID NO: 17139 - RNA, 22 nt, Artificial Sequence
  Synthetic
ucuuccacgccgagcuacgggc

SEQ ID NO: 17140 - RNA, 23 nt, Artificial Sequence
  Synthetic
uucuuccacgccgagcuacgggc

SEQ ID NO: 17141 - RNA, 24 nt, Artificial Sequence
  Synthetic
uuucuuccacgccgagcuacgggc

SEQ ID NO: 17142 - RNA, 18 nt, Artificial Sequence
  Synthetic
gagcuacgggcgcgggag

SEQ ID NO: 17143 - RNA, 19 nt, Artificial Sequence
  Synthetic
cgagcuacgggcgcgggag

SEQ ID NO: 17144 - RNA, 21 nt, Artificial Sequence
  Synthetic
gccgagcuacgggcgcgggag

SEQ ID NO: 17145 - RNA, 22 nt, Artificial Sequence
  Synthetic
cgccgagcuacgggcgcgggag

SEQ ID NO: 17146 - RNA, 23 nt, Artificial Sequence
  Synthetic
acgccgagcuacgggcgcgggag

SEQ ID NO: 17147 - RNA, 24 nt, Artificial Sequence
  Synthetic
cacgccgagcuacgggcgcgggag

SEQ ID NO: 17148 - RNA, 18 nt, Artificial Sequence
  Synthetic
ucucucguuucuuccacg

SEQ ID NO: 17149 - RNA, 19 nt, Artificial Sequence
  Synthetic
cucucucguuucuuccacg

SEQ ID NO: 17150 - RNA, 21 nt, Artificial Sequence
  Synthetic
cgcucucucguuucuuccacg

SEQ ID NO: 17151 - RNA, 22 nt, Artificial Sequence
  Synthetic
gcgcucucucguuucuuccacg

SEQ ID NO: 17152 - RNA, 23 nt, Artificial Sequence
  Synthetic
agcgcucucucguuucuuccacg

SEQ ID NO: 17153 - RNA, 24 nt, Artificial Sequence
  Synthetic
aagcgcucucucguuucuuccacg

SEQ ID NO: 17154 - RNA, 18 nt, Artificial Sequence
  Synthetic
cacgccgagcuacgggcg

SEQ ID NO: 17155 - RNA, 19 nt, Artificial Sequence
  Synthetic
ccacgccgagcuacgggcg

SEQ ID NO: 17156 - RNA, 21 nt, Artificial Sequence
  Synthetic
uuccacgccgagcuacgggcg

SEQ ID NO: 17157 - RNA, 22 nt, Artificial Sequence
  Synthetic
cuuccacgccgagcuacgggcg

SEQ ID NO: 17158 - RNA, 23 nt, Artificial Sequence
  Synthetic
ucuuccacgccgagcuacgggcg

SEQ ID NO: 17159 - RNA, 24 nt, Artificial Sequence
  Synthetic
uucuuccacgccgagcuacgggcg

SEQ ID NO: 17160 - RNA, 18 nt, Artificial Sequence
  Synthetic
caauggaccucuuggucg

SEQ ID NO: 17161 - RNA, 19 nt, Artificial Sequence
  Synthetic
ccaauggaccucuuggucg

SEQ ID NO: 17162 - RNA, 20 nt, Artificial Sequence
  Synthetic
cccaauggaccucuuggucg

SEQ ID NO: 17163 - RNA, 21 nt, Artificial Sequence
  Synthetic
acccaauggaccucuuggucg

SEQ ID NO: 17164 - RNA, 22 nt, Artificial Sequence
  Synthetic
cacccaauggaccucuuggucg

SEQ ID NO: 17165 - RNA, 23 nt, Artificial Sequence
  Synthetic
ccacccaauggaccucuuggucg

SEQ ID NO: 17166 - RNA, 24 nt, Artificial Sequence
  Synthetic
cccacccaauggaccucuuggucg

SEQ ID NO: 17167 - RNA, 18 nt, Artificial Sequence
  Synthetic
caccgcccccccgcccgg

SEQ ID NO: 17168 - RNA, 19 nt, Artificial Sequence
  Synthetic
ccaccgcccccccgcccgg

SEQ ID NO: 17169 - RNA, 21 nt, Artificial Sequence
  Synthetic
cgccaccgcccccccgcccgg

SEQ ID NO: 17170 - RNA, 22 nt, Artificial Sequence
  Synthetic
ucgccaccgcccccccgcccgg

SEQ ID NO: 17171 - RNA, 23 nt, Artificial Sequence
  Synthetic
uucgccaccgcccccccgcccgg

SEQ ID NO: 17172 - RNA, 24 nt, Artificial Sequence
  Synthetic
cuucgccaccgcccccccgcccgg

SEQ ID NO: 17173 - RNA, 18 nt, Artificial Sequence
  Synthetic
gccgagcuacgggcgcgg

SEQ ID NO: 17174 - RNA, 19 nt, Artificial Sequence
  Synthetic
cgccgagcuacgggcgcgg

SEQ ID NO: 17175 - RNA, 21 nt, Artificial Sequence
  Synthetic
cacgccgagcuacgggcgcgg

SEQ ID NO: 17176 - RNA, 22 nt, Artificial Sequence
  Synthetic
ccacgccgagcuacgggcgcgg

SEQ ID NO: 17177 - RNA, 23 nt, Artificial Sequence
  Synthetic
uccacgccgagcuacgggcgcgg

SEQ ID NO: 17178 - RNA, 24 nt, Artificial Sequence
  Synthetic
uuccacgccgagcuacgggcgcgg

SEQ ID NO: 17179 - RNA, 18 nt, Artificial Sequence
  Synthetic
ccgagcuacgggcgcggg

SEQ ID NO: 17180 - RNA, 19 nt, Artificial Sequence
  Synthetic
gccgagcuacgggcgcggg

SEQ ID NO: 17181 - RNA, 21 nt, Artificial Sequence
  Synthetic
acgccgagcuacgggcgcggg

SEQ ID NO: 17182 - RNA, 22 nt, Artificial Sequence
  Synthetic
cacgccgagcuacgggcgcggg

SEQ ID NO: 17183 - RNA, 23 nt, Artificial Sequence
  Synthetic
ccacgccgagcuacgggcgcggg

SEQ ID NO: 17184 - RNA, 24 nt, Artificial Sequence
  Synthetic
uccacgccgagcuacgggcgcggg

SEQ ID NO: 17185 - RNA, 18 nt, Artificial Sequence
  Synthetic
agcgaugugguggaaugg

SEQ ID NO: 17186 - RNA, 19 nt, Artificial Sequence
  Synthetic
cagcgaugugguggaaugg

SEQ ID NO: 17187 - RNA, 21 nt, Artificial Sequence
  Synthetic
cccagcgaugugguggaaugg

SEQ ID NO: 17188 - RNA, 22 nt, Artificial Sequence
  Synthetic
gcccagcgaugugguggaaugg

SEQ ID NO: 17189 - RNA, 23 nt, Artificial Sequence
  Synthetic
ugcccagcgaugugguggaaugg

SEQ ID NO: 17190 - RNA, 24 nt, Artificial Sequence
  Synthetic
cugcccagcgaugugguggaaugg

SEQ ID NO: 17191 - RNA, 18 nt, Artificial Sequence
  Synthetic
cagcgaugugguggaaug

SEQ ID NO: 17192 - RNA, 19 nt, Artificial Sequence
  Synthetic
ccagcgaugugguggaaug

SEQ ID NO: 17193 - RNA, 21 nt, Artificial Sequence
  Synthetic
gcccagcgaugugguggaaug

SEQ ID NO: 17194 - RNA, 22 nt, Artificial Sequence
  Synthetic
ugcccagcgaugugguggaaug

SEQ ID NO: 17195 - RNA, 23 nt, Artificial Sequence
  Synthetic
cugcccagcgaugugguggaaug

SEQ ID NO: 17196 - RNA, 24 nt, Artificial Sequence
  Synthetic
gcugcccagcgaugugguggaaug

SEQ ID NO: 17197 - RNA, 18 nt, Artificial Sequence
  Synthetic
acgcugcccagcgaugug

SEQ ID NO: 17198 - RNA, 19 nt, Artificial Sequence
  Synthetic
aacgcugcccagcgaugug

SEQ ID NO: 17199 - RNA, 21 nt, Artificial Sequence
  Synthetic
ucaacgcugcccagcgaugug

SEQ ID NO: 17200 - RNA, 22 nt, Artificial Sequence
  Synthetic
aucaacgcugcccagcgaugug

SEQ ID NO: 17201 - RNA, 23 nt, Artificial Sequence
  Synthetic
uaucaacgcugcccagcgaugug

SEQ ID NO: 17202 - RNA, 24 nt, Artificial Sequence
  Synthetic
cuaucaacgcugcccagcgaugug

SEQ ID NO: 17203 - RNA, 18 nt, Artificial Sequence
  Synthetic
ccagcgaugugguggaau

SEQ ID NO: 17204 - RNA, 19 nt, Artificial Sequence
  Synthetic
cccagcgaugugguggaau

SEQ ID NO: 17205 - RNA, 21 nt, Artificial Sequence
  Synthetic
ugcccagcgaugugguggaau

SEQ ID NO: 17206 - RNA, 22 nt, Artificial Sequence
  Synthetic
cugcccagcgaugugguggaau

SEQ ID NO: 17207 - RNA, 23 nt, Artificial Sequence
  Synthetic
gcugcccagcgaugugguggaau

SEQ ID NO: 17208 - RNA, 24 nt, Artificial Sequence
  Synthetic
cgcugcccagcgaugugguggaau

SEQ ID NO: 17209 - RNA, 18 nt, Artificial Sequence
  Synthetic
acggccucgggcucuacu

SEQ ID NO: 17210 - RNA, 19 nt, Artificial Sequence
  Synthetic
gacggccucgggcucuacu

SEQ ID NO: 17211 - RNA, 21 nt, Artificial Sequence
  Synthetic
gcgacggccucgggcucuacu

SEQ ID NO: 17212 - RNA, 22 nt, Artificial Sequence
  Synthetic
cgcgacggccucgggcucuacu

SEQ ID NO: 17213 - RNA, 23 nt, Artificial Sequence
  Synthetic
ccgcgacggccucgggcucuacu

SEQ ID NO: 17214 - RNA, 24 nt, Artificial Sequence
  Synthetic
cccgcgacggccucgggcucuacu

SEQ ID NO: 17215 - RNA, 18 nt, Artificial Sequence
  Synthetic
uuucuuccacgccgagcu

SEQ ID NO: 17216 - RNA, 19 nt, Artificial Sequence
  Synthetic
guuucuuccacgccgagcu

SEQ ID NO: 17217 - RNA, 21 nt, Artificial Sequence
  Synthetic
ucguuucuuccacgccgagcu

SEQ ID NO: 17218 - RNA, 22 nt, Artificial Sequence
  Synthetic
cucguuucuuccacgccgagcu

SEQ ID NO: 17219 - RNA, 23 nt, Artificial Sequence
  Synthetic
ucucguuucuuccacgccgagcu

SEQ ID NO: 17220 - RNA, 24 nt, Artificial Sequence
  Synthetic
cucucguuucuuccacgccgagcu

SEQ ID NO: 17221 - RNA, 19 nt, Artificial Sequence
  Synthetic
gcucggcguacgcggccca

SEQ ID NO: 17222 - RNA, 19 nt, Artificial Sequence
  Synthetic
gagggcgaggucgugaagc

SEQ ID NO: 17223 - RNA, 21 nt, Artificial Sequence
  Synthetic
ggaauacgaguccaacuucgc

SEQ ID NO: 17224 - RNA, 24 nt, Artificial Sequence
  Synthetic
gcuggaauacgaguccaacuucgc

SEQ ID NO: 17225 - RNA, 19 nt, Artificial Sequence
  Synthetic
gcgggagguuaaggugcuc

SEQ ID NO: 17226 - RNA, 21 nt, Artificial Sequence
  Synthetic
guacgcggcccauaggaucuc

SEQ ID NO: 17227 - RNA, 23 nt, Artificial Sequence
  Synthetic
gcguacgcggcccauaggaucuc

SEQ ID NO: 17228 - RNA, 24 nt, Artificial Sequence
  Synthetic
ggcguacgcggcccauaggaucuc

SEQ ID NO: 17229 - RNA, 18 nt, Artificial Sequence
  Synthetic
ggguaaaucccggccccg

SEQ ID NO: 17230 - RNA, 19 nt, Artificial Sequence
  Synthetic
gggguaaaucccggccccg

SEQ ID NO: 17231 - RNA, 21 nt, Artificial Sequence
  Synthetic
gggggguaaaucccggccccg

SEQ ID NO: 17232 - RNA, 23 nt, Artificial Sequence
  Synthetic
gugggggguaaaucccggccccg

SEQ ID NO: 17233 - RNA, 18 nt, Artificial Sequence
  Synthetic
guugccaugcaggguggg

SEQ ID NO: 17234 - RNA, 19 nt, Artificial Sequence
  Synthetic
gguugccaugcaggguggg

SEQ ID NO: 17235 - RNA, 23 nt, Artificial Sequence
  Synthetic
gccugguugccaugcaggguggg

SEQ ID NO: 17236 - RNA, 24 nt, Artificial Sequence
  Synthetic
ggccugguugccaugcaggguggg

SEQ ID NO: 17237 - RNA, 18 nt, Artificial Sequence
  Synthetic
gcgggccugguugccaug

SEQ ID NO: 17238 - RNA, 21 nt, Artificial Sequence
  Synthetic
ggcgcgggccugguugccaug

SEQ ID NO: 17239 - RNA, 23 nt, Artificial Sequence
  Synthetic
gaggcgcgggccugguugccaug

SEQ ID NO: 17240 - RNA, 18 nt, Artificial Sequence
  Synthetic
guagggggcggagucgug

SEQ ID NO: 17241 - RNA, 21 nt, Artificial Sequence
  Synthetic
gccguagggggcggagucgug

SEQ ID NO: 17242 - RNA, 23 nt, Artificial Sequence
  Synthetic
gcgccguagggggcggagucgug

SEQ ID NO: 17243 - RNA, 19 nt, Artificial Sequence
  Synthetic
gaggucgugaagcuggaau

SEQ ID NO: 17244 - RNA, 21 nt, Artificial Sequence
  Synthetic
gcgaggucgugaagcuggaau

SEQ ID NO: 17245 - RNA, 22 nt, Artificial Sequence
  Synthetic
ggcgaggucgugaagcuggaau

SEQ ID NO: 17246 - RNA, 23 nt, Artificial Sequence
  Synthetic
gggcgaggucgugaagcuggaau

SEQ ID NO: 17247 - RNA, 21 nt, Artificial Sequence
  Synthetic
gaucuggacauguugggggac

SEQ ID NO: 17248 - RNA, 19 nt, Artificial Sequence
  Synthetic
gacggggauuccccggggc

SEQ ID NO: 17249 - RNA, 21 nt, Artificial Sequence
  Synthetic
gggacggggauuccccggggc

SEQ ID NO: 17250 - RNA, 22 nt, Artificial Sequence
  Synthetic
ggggacggggauuccccggggc

SEQ ID NO: 17251 - RNA, 23 nt, Artificial Sequence
  Synthetic
gggggacggggauuccccggggc

SEQ ID NO: 17252 - RNA, 22 nt, Artificial Sequence
  Synthetic
gcccuuggaauugacgaguacg

SEQ ID NO: 17253 - RNA, 23 nt, Artificial Sequence
  Synthetic
gucaacggagcgcucaccguccg

SEQ ID NO: 17254 - RNA, 23 nt, Artificial Sequence
  Synthetic
guuuaccgaugcccuuggaauug

SEQ ID NO: 17255 - RNA, 18 nt, Artificial Sequence
  Synthetic
gagagcuggcgucaguug

SEQ ID NO: 17256 - RNA, 19 nt, Artificial Sequence
  Synthetic
ggagagcuggcgucaguug

SEQ ID NO: 17257 - RNA, 24 nt, Artificial Sequence
  Synthetic
gaccuggagagcuggcgucaguug

SEQ ID NO: 17258 - RNA, 19 nt, Artificial Sequence
  Synthetic
gcucuggauauggccgacu

SEQ ID NO: 17259 - RNA, 21 nt, Artificial Sequence
  Synthetic
gcgcucuggauauggccgacu

SEQ ID NO: 17260 - RNA, 22 nt, Artificial Sequence
  Synthetic
ggcgcucuggauauggccgacu

SEQ ID NO: 17261 - RNA, 18 nt, Artificial Sequence
  Synthetic
gauguuuaccgaugcccu

SEQ ID NO: 17262 - RNA, 21 nt, Artificial Sequence
  Synthetic
gcagauguuuaccgaugcccu

SEQ ID NO: 17263 - RNA, 23 nt, Artificial Sequence
  Synthetic
gagcagauguuuaccgaugcccu

SEQ ID NO: 17264 - RNA, 18 nt, Artificial Sequence
  Synthetic
gcaaccaggcccgcgccu

SEQ ID NO: 17265 - RNA, 19 nt, Artificial Sequence
  Synthetic
ggcaaccaggcccgcgccu

SEQ ID NO: 17266 - RNA, 23 nt, Artificial Sequence
  Synthetic
gcauggcaaccaggcccgcgccu

SEQ ID NO: 17267 - RNA, 21 nt, Artificial Sequence
  Synthetic
gacuccgcccccuacggcgcu

SEQ ID NO: 17268 - RNA, 19 nt, Artificial Sequence
  Synthetic
gcgcguacgaaaaacaauu

SEQ ID NO: 17269 - RNA, 21 nt, Artificial Sequence
  Synthetic
gcgcgcguacgaaaaacaauu

SEQ ID NO: 17270 - RNA, 24 nt, Artificial Sequence
  Synthetic
gccgcgcgcguacgaaaaacaauu

SEQ ID NO: 17271 - RNA, 18 nt, Artificial Sequence
  Synthetic
cucggcguacgcggccca

SEQ ID NO: 17272 - RNA, 21 nt, Artificial Sequence
  Synthetic
cugcucggcguacgcggccca

SEQ ID NO: 17273 - RNA, 22 nt, Artificial Sequence
  Synthetic
ucugcucggcguacgcggccca

SEQ ID NO: 17274 - RNA, 23 nt, Artificial Sequence
  Synthetic
aucugcucggcguacgcggccca

SEQ ID NO: 17275 - RNA, 24 nt, Artificial Sequence
  Synthetic
caucugcucggcguacgcggccca

SEQ ID NO: 17276 - RNA, 18 nt, Artificial Sequence
  Synthetic
agggcgaggucgugaagc

SEQ ID NO: 17277 - RNA, 21 nt, Artificial Sequence
  Synthetic
cggagggcgaggucgugaagc

SEQ ID NO: 17278 - RNA, 22 nt, Artificial Sequence
  Synthetic
ucggagggcgaggucgugaagc

SEQ ID NO: 17279 - RNA, 23 nt, Artificial Sequence
  Synthetic
cucggagggcgaggucgugaagc

SEQ ID NO: 17280 - RNA, 24 nt, Artificial Sequence
  Synthetic
ccucggagggcgaggucgugaagc

SEQ ID NO: 17281 - RNA, 18 nt, Artificial Sequence
  Synthetic
auacgaguccaacuucgc

SEQ ID NO: 17282 - RNA, 19 nt, Artificial Sequence
  Synthetic
aauacgaguccaacuucgc

SEQ ID NO: 17283 - RNA, 22 nt, Artificial Sequence
  Synthetic
uggaauacgaguccaacuucgc

SEQ ID NO: 17284 - RNA, 23 nt, Artificial Sequence
  Synthetic
cuggaauacgaguccaacuucgc

SEQ ID NO: 17285 - RNA, 18 nt, Artificial Sequence
  Synthetic
cgggagguuaaggugcuc

SEQ ID NO: 17286 - RNA, 21 nt, Artificial Sequence
  Synthetic
cagcgggagguuaaggugcuc

SEQ ID NO: 17287 - RNA, 22 nt, Artificial Sequence
  Synthetic
ccagcgggagguuaaggugcuc

SEQ ID NO: 17288 - RNA, 23 nt, Artificial Sequence
  Synthetic
accagcgggagguuaaggugcuc

SEQ ID NO: 17289 - RNA, 24 nt, Artificial Sequence
  Synthetic
caccagcgggagguuaaggugcuc

SEQ ID NO: 17290 - RNA, 18 nt, Artificial Sequence
  Synthetic
cgcggcccauaggaucuc

SEQ ID NO: 17291 - RNA, 19 nt, Artificial Sequence
  Synthetic
acgcggcccauaggaucuc

SEQ ID NO: 17292 - RNA, 22 nt, Artificial Sequence
  Synthetic
cguacgcggcccauaggaucuc

SEQ ID NO: 17293 - RNA, 22 nt, Artificial Sequence
  Synthetic
ugggggguaaaucccggccccg

SEQ ID NO: 17294 - RNA, 24 nt, Artificial Sequence
  Synthetic
cgugggggguaaaucccggccccg

SEQ ID NO: 17295 - RNA, 18 nt, Artificial Sequence
  Synthetic
ccagagcgccguaggggg

SEQ ID NO: 17296 - RNA, 19 nt, Artificial Sequence
  Synthetic
uccagagcgccguaggggg

SEQ ID NO: 17297 - RNA, 21 nt, Artificial Sequence
  Synthetic
uauccagagcgccguaggggg

SEQ ID NO: 17298 - RNA, 22 nt, Artificial Sequence
  Synthetic
auauccagagcgccguaggggg

SEQ ID NO: 17299 - RNA, 23 nt, Artificial Sequence
  Synthetic
cauauccagagcgccguaggggg

SEQ ID NO: 17300 - RNA, 24 nt, Artificial Sequence
  Synthetic
ccauauccagagcgccguaggggg

SEQ ID NO: 17301 - RNA, 21 nt, Artificial Sequence
  Synthetic
cugguugccaugcaggguggg

SEQ ID NO: 17302 - RNA, 22 nt, Artificial Sequence
  Synthetic
ccugguugccaugcaggguggg

SEQ ID NO: 17303 - RNA, 19 nt, Artificial Sequence
  Synthetic
cgcgggccugguugccaug

SEQ ID NO: 17304 - RNA, 22 nt, Artificial Sequence
  Synthetic
aggcgcgggccugguugccaug

SEQ ID NO: 17305 - RNA, 24 nt, Artificial Sequence
  Synthetic
agaggcgcgggccugguugccaug

SEQ ID NO: 17306 - RNA, 19 nt, Artificial Sequence
  Synthetic
cguagggggcggagucgug

SEQ ID NO: 17307 - RNA, 22 nt, Artificial Sequence
  Synthetic
cgccguagggggcggagucgug

SEQ ID NO: 17308 - RNA, 24 nt, Artificial Sequence
  Synthetic
agcgccguagggggcggagucgug

SEQ ID NO: 17309 - RNA, 18 nt, Artificial Sequence
  Synthetic
aggucgugaagcuggaau

SEQ ID NO: 17310 - RNA, 24 nt, Artificial Sequence
  Synthetic
agggcgaggucgugaagcuggaau

SEQ ID NO: 17311 - RNA, 18 nt, Artificial Sequence
  Synthetic
cuggacauguugggggac

SEQ ID NO: 17312 - RNA, 19 nt, Artificial Sequence
  Synthetic
ucuggacauguugggggac

SEQ ID NO: 17313 - RNA, 22 nt, Artificial Sequence
  Synthetic
cgaucuggacauguugggggac

SEQ ID NO: 17314 - RNA, 23 nt, Artificial Sequence
  Synthetic
ucgaucuggacauguugggggac

SEQ ID NO: 17315 - RNA, 24 nt, Artificial Sequence
  Synthetic
uucgaucuggacauguugggggac

SEQ ID NO: 17316 - RNA, 18 nt, Artificial Sequence
  Synthetic
acggggauuccccggggc

SEQ ID NO: 17317 - RNA, 24 nt, Artificial Sequence
  Synthetic
ugggggacggggauuccccggggc

SEQ ID NO: 17318 - RNA, 18 nt, Artificial Sequence
  Synthetic
uuggaauugacgaguacg

SEQ ID NO: 17319 - RNA, 19 nt, Artificial Sequence
  Synthetic
cuuggaauugacgaguacg

SEQ ID NO: 17320 - RNA, 21 nt, Artificial Sequence
  Synthetic
cccuuggaauugacgaguacg

SEQ ID NO: 17321 - RNA, 23 nt, Artificial Sequence
  Synthetic
ugcccuuggaauugacgaguacg

SEQ ID NO: 17322 - RNA, 24 nt, Artificial Sequence
  Synthetic
augcccuuggaauugacgaguacg

SEQ ID NO: 17323 - RNA, 18 nt, Artificial Sequence
  Synthetic
cggagcgcucaccguccg

SEQ ID NO: 17324 - RNA, 19 nt, Artificial Sequence
  Synthetic
acggagcgcucaccguccg

SEQ ID NO: 17325 - RNA, 21 nt, Artificial Sequence
  Synthetic
caacggagcgcucaccguccg

SEQ ID NO: 17326 - RNA, 22 nt, Artificial Sequence
  Synthetic
ucaacggagcgcucaccguccg

SEQ ID NO: 17327 - RNA, 24 nt, Artificial Sequence
  Synthetic
cgucaacggagcgcucaccguccg

SEQ ID NO: 17328 - RNA, 18 nt, Artificial Sequence
  Synthetic
ccgaugcccuuggaauug

SEQ ID NO: 17329 - RNA, 19 nt, Artificial Sequence
  Synthetic
accgaugcccuuggaauug

SEQ ID NO: 17330 - RNA, 21 nt, Artificial Sequence
  Synthetic
uuaccgaugcccuuggaauug

SEQ ID NO: 17331 - RNA, 22 nt, Artificial Sequence
  Synthetic
uuuaccgaugcccuuggaauug

SEQ ID NO: 17332 - RNA, 24 nt, Artificial Sequence
  Synthetic
uguuuaccgaugcccuuggaauug

SEQ ID NO: 17333 - RNA, 21 nt, Artificial Sequence
  Synthetic
cuggagagcuggcgucaguug

SEQ ID NO: 17334 - RNA, 22 nt, Artificial Sequence
  Synthetic
ccuggagagcuggcgucaguug

SEQ ID NO: 17335 - RNA, 23 nt, Artificial Sequence
  Synthetic
accuggagagcuggcgucaguug

SEQ ID NO: 17336 - RNA, 18 nt, Artificial Sequence
  Synthetic
cucuggauauggccgacu

SEQ ID NO: 17337 - RNA, 23 nt, Artificial Sequence
  Synthetic
cggcgcucuggauauggccgacu

SEQ ID NO: 17338 - RNA, 24 nt, Artificial Sequence
  Synthetic
acggcgcucuggauauggccgacu

SEQ ID NO: 17339 - RNA, 19 nt, Artificial Sequence
  Synthetic
agauguuuaccgaugcccu

SEQ ID NO: 17340 - RNA, 22 nt, Artificial Sequence
  Synthetic
agcagauguuuaccgaugcccu

SEQ ID NO: 17341 - RNA, 24 nt, Artificial Sequence
  Synthetic
ugagcagauguuuaccgaugcccu

SEQ ID NO: 17342 - RNA, 21 nt, Artificial Sequence
  Synthetic
auggcaaccaggcccgcgccu

SEQ ID NO: 17343 - RNA, 22 nt, Artificial Sequence
  Synthetic
cauggcaaccaggcccgcgccu

SEQ ID NO: 17344 - RNA, 24 nt, Artificial Sequence
  Synthetic
ugcauggcaaccaggcccgcgccu

SEQ ID NO: 17345 - RNA, 18 nt, Artificial Sequence
  Synthetic
uccgcccccuacggcgcu

SEQ ID NO: 17346 - RNA, 19 nt, Artificial Sequence
  Synthetic
cuccgcccccuacggcgcu

SEQ ID NO: 17347 - RNA, 22 nt, Artificial Sequence
  Synthetic
cgacuccgcccccuacggcgcu

SEQ ID NO: 17348 - RNA, 23 nt, Artificial Sequence
  Synthetic
acgacuccgcccccuacggcgcu

SEQ ID NO: 17349 - RNA, 24 nt, Artificial Sequence
  Synthetic
cacgacuccgcccccuacggcgcu

SEQ ID NO: 17350 - RNA, 18 nt, Artificial Sequence
  Synthetic
cgcguacgaaaaacaauu

SEQ ID NO: 17351 - RNA, 22 nt, Artificial Sequence
  Synthetic
cgcgcgcguacgaaaaacaauu

SEQ ID NO: 17352 - RNA, 23 nt, Artificial Sequence
  Synthetic
ccgcgcgcguacgaaaaacaauu

SEQ ID NO: 17353 - RNA, 18 nt, Artificial Sequence
  Synthetic
cagcucuccaggucgcaa

SEQ ID NO: 17354 - RNA, 19 nt, Artificial Sequence
  Synthetic
ccagcucuccaggucgcaa

SEQ ID NO: 17355 - RNA, 21 nt, Artificial Sequence
  Synthetic
cgccagcucuccaggucgcaa

SEQ ID NO: 17356 - RNA, 22 nt, Artificial Sequence
  Synthetic
acgccagcucuccaggucgcaa

SEQ ID NO: 17357 - RNA, 23 nt, Artificial Sequence
  Synthetic
gacgccagcucuccaggucgcaa

SEQ ID NO: 17358 - RNA, 24 nt, Artificial Sequence
  Synthetic
ugacgccagcucuccaggucgcaa

SEQ ID NO: 17359 - RNA, 18 nt, Artificial Sequence
  Synthetic
cacguccucgccgucuaa

SEQ ID NO: 17360 - RNA, 19 nt, Artificial Sequence
  Synthetic
ccacguccucgccgucuaa

SEQ ID NO: 17361 - RNA, 21 nt, Artificial Sequence
  Synthetic
cgccacguccucgccgucuaa

SEQ ID NO: 17362 - RNA, 22 nt, Artificial Sequence
  Synthetic
ucgccacguccucgccgucuaa

SEQ ID NO: 17363 - RNA, 23 nt, Artificial Sequence
  Synthetic
aucgccacguccucgccgucuaa

SEQ ID NO: 17364 - RNA, 24 nt, Artificial Sequence
  Synthetic
caucgccacguccucgccgucuaa

SEQ ID NO: 17365 - RNA, 18 nt, Artificial Sequence
  Synthetic
uagccgcgcugcgcacca

SEQ ID NO: 17366 - RNA, 19 nt, Artificial Sequence
  Synthetic
guagccgcgcugcgcacca

SEQ ID NO: 17367 - RNA, 21 nt, Artificial Sequence
  Synthetic
ccguagccgcgcugcgcacca

SEQ ID NO: 17368 - RNA, 22 nt, Artificial Sequence
  Synthetic
uccguagccgcgcugcgcacca

SEQ ID NO: 17369 - RNA, 23 nt, Artificial Sequence
  Synthetic
cuccguagccgcgcugcgcacca

SEQ ID NO: 17370 - RNA, 24 nt, Artificial Sequence
  Synthetic
ccuccguagccgcgcugcgcacca

SEQ ID NO: 17371 - RNA, 18 nt, Artificial Sequence
  Synthetic
ucccccaacauguccaga

SEQ ID NO: 17372 - RNA, 19 nt, Artificial Sequence
  Synthetic
gucccccaacauguccaga

SEQ ID NO: 17373 - RNA, 21 nt, Artificial Sequence
  Synthetic
ccgucccccaacauguccaga

SEQ ID NO: 17374 - RNA, 22 nt, Artificial Sequence
  Synthetic
cccgucccccaacauguccaga

SEQ ID NO: 17375 - RNA, 23 nt, Artificial Sequence
  Synthetic
ccccgucccccaacauguccaga

SEQ ID NO: 17376 - RNA, 24 nt, Artificial Sequence
  Synthetic
uccccgucccccaacauguccaga

SEQ ID NO: 17377 - RNA, 18 nt, Artificial Sequence
  Synthetic
gcgucgucguccgggaga

SEQ ID NO: 17378 - RNA, 19 nt, Artificial Sequence
  Synthetic
ggcgucgucguccgggaga

SEQ ID NO: 17379 - RNA, 21 nt, Artificial Sequence
  Synthetic
ggggcgucgucguccgggaga

SEQ ID NO: 17380 - RNA, 22 nt, Artificial Sequence
  Synthetic
gggggcgucgucguccgggaga

SEQ ID NO: 17381 - RNA, 23 nt, Artificial Sequence
  Synthetic
cgggggcgucgucguccgggaga

SEQ ID NO: 17382 - RNA, 24 nt, Artificial Sequence
  Synthetic
ucgggggcgucgucguccgggaga

SEQ ID NO: 17383 - RNA, 18 nt, Artificial Sequence
  Synthetic
gugugucccgcggggaga

SEQ ID NO: 17384 - RNA, 19 nt, Artificial Sequence
  Synthetic
cgugugucccgcggggaga

SEQ ID NO: 17385 - RNA, 21 nt, Artificial Sequence
  Synthetic
cgcgugugucccgcggggaga

SEQ ID NO: 17386 - RNA, 22 nt, Artificial Sequence
  Synthetic
gcgcgugugucccgcggggaga

SEQ ID NO: 17387 - RNA, 23 nt, Artificial Sequence
  Synthetic
ugcgcgugugucccgcggggaga

SEQ ID NO: 17388 - RNA, 24 nt, Artificial Sequence
  Synthetic
cugcgcgugugucccgcggggaga

SEQ ID NO: 17389 - RNA, 18 nt, Artificial Sequence
  Synthetic
cauauccagagcgccgua

SEQ ID NO: 17390 - RNA, 19 nt, Artificial Sequence
  Synthetic
ccauauccagagcgccgua

SEQ ID NO: 17391 - RNA, 21 nt, Artificial Sequence
  Synthetic
ggccauauccagagcgccgua

SEQ ID NO: 17392 - RNA, 22 nt, Artificial Sequence
  Synthetic
cggccauauccagagcgccgua

SEQ ID NO: 17393 - RNA, 23 nt, Artificial Sequence
  Synthetic
ucggccauauccagagcgccgua

SEQ ID NO: 17394 - RNA, 24 nt, Artificial Sequence
  Synthetic
gucggccauauccagagcgccgua

SEQ ID NO: 17395 - RNA, 18 nt, Artificial Sequence
  Synthetic
ggcgcgcagguaccggua

SEQ ID NO: 17396 - RNA, 19 nt, Artificial Sequence
  Synthetic
uggcgcgcagguaccggua

SEQ ID NO: 17397 - RNA, 21 nt, Artificial Sequence
  Synthetic
gcuggcgcgcagguaccggua

SEQ ID NO: 17398 - RNA, 22 nt, Artificial Sequence
  Synthetic
cgcuggcgcgcagguaccggua

SEQ ID NO: 17399 - RNA, 23 nt, Artificial Sequence
  Synthetic
acgcuggcgcgcagguaccggua

SEQ ID NO: 17400 - RNA, 24 nt, Artificial Sequence
  Synthetic
gacgcuggcgcgcagguaccggua

SEQ ID NO: 17401 - RNA, 18 nt, Artificial Sequence
  Synthetic
guaaacaucugcucaaac

SEQ ID NO: 17402 - RNA, 19 nt, Artificial Sequence
  Synthetic
gguaaacaucugcucaaac

SEQ ID NO: 17403 - RNA, 21 nt, Artificial Sequence
  Synthetic
ucgguaaacaucugcucaaac

SEQ ID NO: 17404 - RNA, 22 nt, Artificial Sequence
  Synthetic
aucgguaaacaucugcucaaac

SEQ ID NO: 17405 - RNA, 23 nt, Artificial Sequence
  Synthetic
caucgguaaacaucugcucaaac

SEQ ID NO: 17406 - RNA, 24 nt, Artificial Sequence
  Synthetic
gcaucgguaaacaucugcucaaac

SEQ ID NO: 17407 - RNA, 18 nt, Artificial Sequence
  Synthetic
agcgcuccguugacgaac

SEQ ID NO: 17408 - RNA, 19 nt, Artificial Sequence
  Synthetic
gagcgcuccguugacgaac

SEQ ID NO: 17409 - RNA, 21 nt, Artificial Sequence
  Synthetic
gugagcgcuccguugacgaac

SEQ ID NO: 17410 - RNA, 22 nt, Artificial Sequence
  Synthetic
ggugagcgcuccguugacgaac

SEQ ID NO: 17411 - RNA, 23 nt, Artificial Sequence
  Synthetic
cggugagcgcuccguugacgaac

SEQ ID NO: 17412 - RNA, 24 nt, Artificial Sequence
  Synthetic
acggugagcgcuccguugacgaac

SEQ ID NO: 17413 - RNA, 18 nt, Artificial Sequence
  Synthetic
ucaacaccauaaaguacc

SEQ ID NO: 17414 - RNA, 19 nt, Artificial Sequence
  Synthetic
aucaacaccauaaaguacc

SEQ ID NO: 17415 - RNA, 21 nt, Artificial Sequence
  Synthetic
gaaucaacaccauaaaguacc

SEQ ID NO: 17416 - RNA, 22 nt, Artificial Sequence
  Synthetic
cgaaucaacaccauaaaguacc

SEQ ID NO: 17417 - RNA, 23 nt, Artificial Sequence
  Synthetic
ccgaaucaacaccauaaaguacc

SEQ ID NO: 17418 - RNA, 24 nt, Artificial Sequence
  Synthetic
cccgaaucaacaccauaaaguacc

SEQ ID NO: 17419 - RNA, 18 nt, Artificial Sequence
  Synthetic
gggguaaaucccggcccc

SEQ ID NO: 17420 - RNA, 19 nt, Artificial Sequence
  Synthetic
ggggguaaaucccggcccc

SEQ ID NO: 17421 - RNA, 21 nt, Artificial Sequence
  Synthetic
ugggggguaaaucccggcccc

SEQ ID NO: 17422 - RNA, 22 nt, Artificial Sequence
  Synthetic
gugggggguaaaucccggcccc

SEQ ID NO: 17423 - RNA, 23 nt, Artificial Sequence
  Synthetic
cgugggggguaaaucccggcccc

SEQ ID NO: 17424 - RNA, 24 nt, Artificial Sequence
  Synthetic
ucgugggggguaaaucccggcccc

SEQ ID NO: 17425 - RNA, 18 nt, Artificial Sequence
  Synthetic
ggggguaaaucccggccc

SEQ ID NO: 17426 - RNA, 19 nt, Artificial Sequence
  Synthetic
gggggguaaaucccggccc

SEQ ID NO: 17427 - RNA, 21 nt, Artificial Sequence
  Synthetic
gugggggguaaaucccggccc

SEQ ID NO: 17428 - RNA, 22 nt, Artificial Sequence
  Synthetic
cgugggggguaaaucccggccc

SEQ ID NO: 17429 - RNA, 23 nt, Artificial Sequence
  Synthetic
ucgugggggguaaaucccggccc

SEQ ID NO: 17430 - RNA, 24 nt, Artificial Sequence
  Synthetic
gucgugggggguaaaucccggccc

SEQ ID NO: 17431 - RNA, 18 nt, Artificial Sequence
  Synthetic
agucugcgcguguguccc

SEQ ID NO: 17432 - RNA, 19 nt, Artificial Sequence
  Synthetic
cagucugcgcguguguccc

SEQ ID NO: 17433 - RNA, 21 nt, Artificial Sequence
  Synthetic
gacagucugcgcguguguccc

SEQ ID NO: 17434 - RNA, 22 nt, Artificial Sequence
  Synthetic
cgacagucugcgcguguguccc

SEQ ID NO: 17435 - RNA, 23 nt, Artificial Sequence
  Synthetic
ucgacagucugcgcguguguccc

SEQ ID NO: 17436 - RNA, 24 nt, Artificial Sequence
  Synthetic
gucgacagucugcgcguguguccc

SEQ ID NO: 17437 - RNA, 18 nt, Artificial Sequence
  Synthetic
uguucccgcaugaccgcc

SEQ ID NO: 17438 - RNA, 19 nt, Artificial Sequence
  Synthetic
guguucccgcaugaccgcc

SEQ ID NO: 17439 - RNA, 21 nt, Artificial Sequence
  Synthetic
gcguguucccgcaugaccgcc

SEQ ID NO: 17440 - RNA, 22 nt, Artificial Sequence
  Synthetic
cgcguguucccgcaugaccgcc

SEQ ID NO: 17441 - RNA, 23 nt, Artificial Sequence
  Synthetic
acgcguguucccgcaugaccgcc

SEQ ID NO: 17442 - RNA, 24 nt, Artificial Sequence
  Synthetic
uacgcguguucccgcaugaccgcc

SEQ ID NO: 17443 - RNA, 18 nt, Artificial Sequence
  Synthetic
gggggguaaaucccggcc

SEQ ID NO: 17444 - RNA, 19 nt, Artificial Sequence
  Synthetic
ugggggguaaaucccggcc

SEQ ID NO: 17445 - RNA, 21 nt, Artificial Sequence
  Synthetic
cgugggggguaaaucccggcc

SEQ ID NO: 17446 - RNA, 22 nt, Artificial Sequence
  Synthetic
ucgugggggguaaaucccggcc

SEQ ID NO: 17447 - RNA, 23 nt, Artificial Sequence
  Synthetic
gucgugggggguaaaucccggcc

SEQ ID NO: 17448 - RNA, 24 nt, Artificial Sequence
  Synthetic
agucgugggggguaaaucccggcc

SEQ ID NO: 17449 - RNA, 18 nt, Artificial Sequence
  Synthetic
ggccucgauuggcacucc

SEQ ID NO: 17450 - RNA, 19 nt, Artificial Sequence
  Synthetic
gggccucgauuggcacucc

SEQ ID NO: 17451 - RNA, 21 nt, Artificial Sequence
  Synthetic
gcgggccucgauuggcacucc

SEQ ID NO: 17452 - RNA, 22 nt, Artificial Sequence
  Synthetic
ggcgggccucgauuggcacucc

SEQ ID NO: 17453 - RNA, 23 nt, Artificial Sequence
  Synthetic
cggcgggccucgauuggcacucc

SEQ ID NO: 17454 - RNA, 24 nt, Artificial Sequence
  Synthetic
ccggcgggccucgauuggcacucc

SEQ ID NO: 17455 - RNA, 18 nt, Artificial Sequence
  Synthetic
ucgggggcgucgucgucc

SEQ ID NO: 17456 - RNA, 19 nt, Artificial Sequence
  Synthetic
uucgggggcgucgucgucc

SEQ ID NO: 17457 - RNA, 21 nt, Artificial Sequence
  Synthetic
ucuucgggggcgucgucgucc

SEQ ID NO: 17458 - RNA, 22 nt, Artificial Sequence
  Synthetic
cucuucgggggcgucgucgucc

SEQ ID NO: 17459 - RNA, 23 nt, Artificial Sequence
  Synthetic
ccucuucgggggcgucgucgucc

SEQ ID NO: 17460 - RNA, 24 nt, Artificial Sequence
  Synthetic
gccucuucgggggcgucgucgucc

SEQ ID NO: 17461 - RNA, 18 nt, Artificial Sequence
  Synthetic
accguacucgucaauucc

SEQ ID NO: 17462 - RNA, 19 nt, Artificial Sequence
  Synthetic
caccguacucgucaauucc

SEQ ID NO: 17463 - RNA, 21 nt, Artificial Sequence
  Synthetic
cccaccguacucgucaauucc

SEQ ID NO: 17464 - RNA, 22 nt, Artificial Sequence
  Synthetic
acccaccguacucgucaauucc

SEQ ID NO: 17465 - RNA, 23 nt, Artificial Sequence
  Synthetic
uacccaccguacucgucaauucc

SEQ ID NO: 17466 - RNA, 24 nt, Artificial Sequence
  Synthetic
cuacccaccguacucgucaauucc

SEQ ID NO: 17467 - RNA, 18 nt, Artificial Sequence
  Synthetic
gccgcgcugcgcaccagc

SEQ ID NO: 17468 - RNA, 19 nt, Artificial Sequence
  Synthetic
agccgcgcugcgcaccagc

SEQ ID NO: 17469 - RNA, 21 nt, Artificial Sequence
  Synthetic
guagccgcgcugcgcaccagc

SEQ ID NO: 17470 - RNA, 22 nt, Artificial Sequence
  Synthetic
cguagccgcgcugcgcaccagc

SEQ ID NO: 17471 - RNA, 23 nt, Artificial Sequence
  Synthetic
ccguagccgcgcugcgcaccagc

SEQ ID NO: 17472 - RNA, 24 nt, Artificial Sequence
  Synthetic
uccguagccgcgcugcgcaccagc

SEQ ID NO: 17473 - RNA, 18 nt, Artificial Sequence
  Synthetic
ucugcgcgugugucccgc

SEQ ID NO: 17474 - RNA, 19 nt, Artificial Sequence
  Synthetic
gucugcgcgugugucccgc

SEQ ID NO: 17475 - RNA, 21 nt, Artificial Sequence
  Synthetic
cagucugcgcgugugucccgc

SEQ ID NO: 17476 - RNA, 22 nt, Artificial Sequence
  Synthetic
acagucugcgcgugugucccgc

SEQ ID NO: 17477 - RNA, 23 nt, Artificial Sequence
  Synthetic
gacagucugcgcgugugucccgc

SEQ ID NO: 17478 - RNA, 24 nt, Artificial Sequence
  Synthetic
cgacagucugcgcgugugucccgc

SEQ ID NO: 17479 - RNA, 18 nt, Artificial Sequence
  Synthetic
cggggagaaaggacaggc

SEQ ID NO: 17480 - RNA, 19 nt, Artificial Sequence
  Synthetic
gcggggagaaaggacaggc

SEQ ID NO: 17481 - RNA, 21 nt, Artificial Sequence
  Synthetic
ccgcggggagaaaggacaggc

SEQ ID NO: 17482 - RNA, 22 nt, Artificial Sequence
  Synthetic
cccgcggggagaaaggacaggc

SEQ ID NO: 17483 - RNA, 23 nt, Artificial Sequence
  Synthetic
ucccgcggggagaaaggacaggc

SEQ ID NO: 17484 - RNA, 24 nt, Artificial Sequence
  Synthetic
gucccgcggggagaaaggacaggc

SEQ ID NO: 17485 - RNA, 18 nt, Artificial Sequence
  Synthetic
cauaaaguacccagaggc

SEQ ID NO: 17486 - RNA, 19 nt, Artificial Sequence
  Synthetic
ccauaaaguacccagaggc

SEQ ID NO: 17487 - RNA, 21 nt, Artificial Sequence
  Synthetic
caccauaaaguacccagaggc

SEQ ID NO: 17488 - RNA, 22 nt, Artificial Sequence
  Synthetic
acaccauaaaguacccagaggc

SEQ ID NO: 17489 - RNA, 23 nt, Artificial Sequence
  Synthetic
aacaccauaaaguacccagaggc

SEQ ID NO: 17490 - RNA, 24 nt, Artificial Sequence
  Synthetic
caacaccauaaaguacccagaggc

SEQ ID NO: 17491 - RNA, 18 nt, Artificial Sequence
  Synthetic
uugacgaacaugaagggc

SEQ ID NO: 17492 - RNA, 19 nt, Artificial Sequence
  Synthetic
guugacgaacaugaagggc

SEQ ID NO: 17493 - RNA, 21 nt, Artificial Sequence
  Synthetic
ccguugacgaacaugaagggc

SEQ ID NO: 17494 - RNA, 22 nt, Artificial Sequence
  Synthetic
uccguugacgaacaugaagggc

SEQ ID NO: 17495 - RNA, 23 nt, Artificial Sequence
  Synthetic
cuccguugacgaacaugaagggc

SEQ ID NO: 17496 - RNA, 24 nt, Artificial Sequence
  Synthetic
gcuccguugacgaacaugaagggc

SEQ ID NO: 17497 - RNA, 18 nt, Artificial Sequence
  Synthetic
cucgaagucggccauauc

SEQ ID NO: 17498 - RNA, 19 nt, Artificial Sequence
  Synthetic
acucgaagucggccauauc

SEQ ID NO: 17499 - RNA, 21 nt, Artificial Sequence
  Synthetic
aaacucgaagucggccauauc

SEQ ID NO: 17500 - RNA, 22 nt, Artificial Sequence
  Synthetic
caaacucgaagucggccauauc

SEQ ID NO: 17501 - RNA, 23 nt, Artificial Sequence
  Synthetic
ucaaacucgaagucggccauauc

SEQ ID NO: 17502 - RNA, 24 nt, Artificial Sequence
  Synthetic
cucaaacucgaagucggccauauc

SEQ ID NO: 17503 - RNA, 18 nt, Artificial Sequence
  Synthetic
gccguagggggcggaguc

SEQ ID NO: 17504 - RNA, 19 nt, Artificial Sequence
  Synthetic
cgccguagggggcggaguc

SEQ ID NO: 17505 - RNA, 21 nt, Artificial Sequence
  Synthetic
agcgccguagggggcggaguc

SEQ ID NO: 17506 - RNA, 22 nt, Artificial Sequence
  Synthetic
gagcgccguagggggcggaguc

SEQ ID NO: 17507 - RNA, 23 nt, Artificial Sequence
  Synthetic
agagcgccguagggggcggaguc

SEQ ID NO: 17508 - RNA, 24 nt, Artificial Sequence
  Synthetic
cagagcgccguagggggcggaguc

SEQ ID NO: 17509 - RNA, 18 nt, Artificial Sequence
  Synthetic
uucgggggcgucgucguc

SEQ ID NO: 17510 - RNA, 19 nt, Artificial Sequence
  Synthetic
cuucgggggcgucgucguc

SEQ ID NO: 17511 - RNA, 21 nt, Artificial Sequence
  Synthetic
cucuucgggggcgucgucguc

SEQ ID NO: 17512 - RNA, 22 nt, Artificial Sequence
  Synthetic
ccucuucgggggcgucgucguc

SEQ ID NO: 17513 - RNA, 23 nt, Artificial Sequence
  Synthetic
gccucuucgggggcgucgucguc

SEQ ID NO: 17514 - RNA, 24 nt, Artificial Sequence
  Synthetic
cgccucuucgggggcgucgucguc

SEQ ID NO: 17515 - RNA, 18 nt, Artificial Sequence
  Synthetic
gccucggagggcgagguc

SEQ ID NO: 17516 - RNA, 19 nt, Artificial Sequence
  Synthetic
cgccucggagggcgagguc

SEQ ID NO: 17517 - RNA, 21 nt, Artificial Sequence
  Synthetic
accgccucggagggcgagguc

SEQ ID NO: 17518 - RNA, 22 nt, Artificial Sequence
  Synthetic
gaccgccucggagggcgagguc

SEQ ID NO: 17519 - RNA, 23 nt, Artificial Sequence
  Synthetic
ugaccgccucggagggcgagguc

SEQ ID NO: 17520 - RNA, 24 nt, Artificial Sequence
  Synthetic
augaccgccucggagggcgagguc

SEQ ID NO: 17521 - RNA, 18 nt, Artificial Sequence
  Synthetic
cccaggcugacaucgguc

SEQ ID NO: 17522 - RNA, 19 nt, Artificial Sequence
  Synthetic
ccccaggcugacaucgguc

SEQ ID NO: 17523 - RNA, 21 nt, Artificial Sequence
  Synthetic
ucccccaggcugacaucgguc

SEQ ID NO: 17524 - RNA, 22 nt, Artificial Sequence
  Synthetic
gucccccaggcugacaucgguc

SEQ ID NO: 17525 - RNA, 23 nt, Artificial Sequence
  Synthetic
cgucccccaggcugacaucgguc

SEQ ID NO: 17526 - RNA, 24 nt, Artificial Sequence
  Synthetic
ucgucccccaggcugacaucgguc

SEQ ID NO: 17527 - RNA, 18 nt, Artificial Sequence
  Synthetic
cgccagccccgccucuuc

SEQ ID NO: 17528 - RNA, 19 nt, Artificial Sequence
  Synthetic
ccgccagccccgccucuuc

SEQ ID NO: 17529 - RNA, 21 nt, Artificial Sequence
  Synthetic
agccgccagccccgccucuuc

SEQ ID NO: 17530 - RNA, 22 nt, Artificial Sequence
  Synthetic
gagccgccagccccgccucuuc

SEQ ID NO: 17531 - RNA, 23 nt, Artificial Sequence
  Synthetic
ggagccgccagccccgccucuuc

SEQ ID NO: 17532 - RNA, 24 nt, Artificial Sequence
  Synthetic
cggagccgccagccccgccucuuc

SEQ ID NO: 17533 - RNA, 18 nt, Artificial Sequence
  Synthetic
gagggcgaggucgugaag

SEQ ID NO: 17534 - RNA, 19 nt, Artificial Sequence
  Synthetic
ggagggcgaggucgugaag

SEQ ID NO: 17535 - RNA, 21 nt, Artificial Sequence
  Synthetic
ucggagggcgaggucgugaag

SEQ ID NO: 17536 - RNA, 22 nt, Artificial Sequence
  Synthetic
cucggagggcgaggucgugaag

SEQ ID NO: 17537 - RNA, 23 nt, Artificial Sequence
  Synthetic
ccucggagggcgaggucgugaag

SEQ ID NO: 17538 - RNA, 24 nt, Artificial Sequence
  Synthetic
gccucggagggcgaggucgugaag

SEQ ID NO: 17539 - RNA, 18 nt, Artificial Sequence
  Synthetic
acguccucgccgucuaag

SEQ ID NO: 17540 - RNA, 19 nt, Artificial Sequence
  Synthetic
cacguccucgccgucuaag

SEQ ID NO: 17541 - RNA, 21 nt, Artificial Sequence
  Synthetic
gccacguccucgccgucuaag

SEQ ID NO: 17542 - RNA, 22 nt, Artificial Sequence
  Synthetic
cgccacguccucgccgucuaag

SEQ ID NO: 17543 - RNA, 23 nt, Artificial Sequence
  Synthetic
ucgccacguccucgccgucuaag

SEQ ID NO: 17544 - RNA, 24 nt, Artificial Sequence
  Synthetic
aucgccacguccucgccgucuaag

SEQ ID NO: 17545 - RNA, 18 nt, Artificial Sequence
  Synthetic
agccgcgcugcgcaccag

SEQ ID NO: 17546 - RNA, 19 nt, Artificial Sequence
  Synthetic
uagccgcgcugcgcaccag

SEQ ID NO: 17547 - RNA, 21 nt, Artificial Sequence
  Synthetic
cguagccgcgcugcgcaccag

SEQ ID NO: 17548 - RNA, 22 nt, Artificial Sequence
  Synthetic
ccguagccgcgcugcgcaccag

SEQ ID NO: 17549 - RNA, 23 nt, Artificial Sequence
  Synthetic
uccguagccgcgcugcgcaccag

SEQ ID NO: 17550 - RNA, 24 nt, Artificial Sequence
  Synthetic
cuccguagccgcgcugcgcaccag

SEQ ID NO: 17551 - RNA, 18 nt, Artificial Sequence
  Synthetic
aaacaaaacacgcgccag

SEQ ID NO: 17552 - RNA, 19 nt, Artificial Sequence
  Synthetic
aaaacaaaacacgcgccag

SEQ ID NO: 17553 - RNA, 21 nt, Artificial Sequence
  Synthetic
caaaaacaaaacacgcgccag

SEQ ID NO: 17554 - RNA, 22 nt, Artificial Sequence
  Synthetic
gcaaaaacaaaacacgcgccag

SEQ ID NO: 17555 - RNA, 23 nt, Artificial Sequence
  Synthetic
ugcaaaaacaaaacacgcgccag

SEQ ID NO: 17556 - RNA, 24 nt, Artificial Sequence
  Synthetic
augcaaaaacaaaacacgcgccag

SEQ ID NO: 17557 - RNA, 18 nt, Artificial Sequence
  Synthetic
uaccgguacagggccgag

SEQ ID NO: 17558 - RNA, 19 nt, Artificial Sequence
  Synthetic
guaccgguacagggccgag

SEQ ID NO: 17559 - RNA, 21 nt, Artificial Sequence
  Synthetic
agguaccgguacagggccgag

SEQ ID NO: 17560 - RNA, 22 nt, Artificial Sequence
  Synthetic
cagguaccgguacagggccgag

SEQ ID NO: 17561 - RNA, 23 nt, Artificial Sequence
  Synthetic
gcagguaccgguacagggccgag

SEQ ID NO: 17562 - RNA, 24 nt, Artificial Sequence
  Synthetic
cgcagguaccgguacagggccgag

SEQ ID NO: 17563 - RNA, 18 nt, Artificial Sequence
  Synthetic
auuggcacuccccggacg

SEQ ID NO: 17564 - RNA, 19 nt, Artificial Sequence
  Synthetic
gauuggcacuccccggacg

SEQ ID NO: 17565 - RNA, 21 nt, Artificial Sequence
  Synthetic
ucgauuggcacuccccggacg

SEQ ID NO: 17566 - RNA, 22 nt, Artificial Sequence
  Synthetic
cucgauuggcacuccccggacg

SEQ ID NO: 17567 - RNA, 23 nt, Artificial Sequence
  Synthetic
ccucgauuggcacuccccggacg

SEQ ID NO: 17568 - RNA, 24 nt, Artificial Sequence
  Synthetic
gccucgauuggcacuccccggacg

SEQ ID NO: 17569 - RNA, 18 nt, Artificial Sequence
  Synthetic
gucugcgcgugugucccg

SEQ ID NO: 17570 - RNA, 19 nt, Artificial Sequence
  Synthetic
agucugcgcgugugucccg

SEQ ID NO: 17571 - RNA, 21 nt, Artificial Sequence
  Synthetic
acagucugcgcgugugucccg

SEQ ID NO: 17572 - RNA, 22 nt, Artificial Sequence
  Synthetic
gacagucugcgcgugugucccg

SEQ ID NO: 17573 - RNA, 23 nt, Artificial Sequence
  Synthetic
cgacagucugcgcgugugucccg

SEQ ID NO: 17574 - RNA, 24 nt, Artificial Sequence
  Synthetic
ucgacagucugcgcgugugucccg

SEQ ID NO: 17575 - RNA, 18 nt, Artificial Sequence
  Synthetic
guuuagcucccgcagccg

SEQ ID NO: 17576 - RNA, 19 nt, Artificial Sequence
  Synthetic
gguuuagcucccgcagccg

SEQ ID NO: 17577 - RNA, 21 nt, Artificial Sequence
  Synthetic
gugguuuagcucccgcagccg

SEQ ID NO: 17578 - RNA, 22 nt, Artificial Sequence
  Synthetic
ugugguuuagcucccgcagccg

SEQ ID NO: 17579 - RNA, 23 nt, Artificial Sequence
  Synthetic
augugguuuagcucccgcagccg

SEQ ID NO: 17580 - RNA, 24 nt, Artificial Sequence
  Synthetic
aaugugguuuagcucccgcagccg

SEQ ID NO: 17581 - RNA, 18 nt, Artificial Sequence
  Synthetic
gccauauccagagcgccg

SEQ ID NO: 17582 - RNA, 19 nt, Artificial Sequence
  Synthetic
ggccauauccagagcgccg

SEQ ID NO: 17583 - RNA, 21 nt, Artificial Sequence
  Synthetic
ucggccauauccagagcgccg

SEQ ID NO: 17584 - RNA, 22 nt, Artificial Sequence
  Synthetic
gucggccauauccagagcgccg

SEQ ID NO: 17585 - RNA, 23 nt, Artificial Sequence
  Synthetic
agucggccauauccagagcgccg

SEQ ID NO: 17586 - RNA, 24 nt, Artificial Sequence
  Synthetic
aagucggccauauccagagcgccg

SEQ ID NO: 17587 - RNA, 18 nt, Artificial Sequence
  Synthetic
cugcgcgugugucccgcg

SEQ ID NO: 17588 - RNA, 19 nt, Artificial Sequence
  Synthetic
ucugcgcgugugucccgcg

SEQ ID NO: 17589 - RNA, 21 nt, Artificial Sequence
  Synthetic
agucugcgcgugugucccgcg

SEQ ID NO: 17590 - RNA, 22 nt, Artificial Sequence
  Synthetic
cagucugcgcgugugucccgcg

SEQ ID NO: 17591 - RNA, 23 nt, Artificial Sequence
  Synthetic
acagucugcgcgugugucccgcg

SEQ ID NO: 17592 - RNA, 24 nt, Artificial Sequence
  Synthetic
gacagucugcgcgugugucccgcg

SEQ ID NO: 17593 - RNA, 18 nt, Artificial Sequence
  Synthetic
ggggagaaaggacaggcg

SEQ ID NO: 17594 - RNA, 19 nt, Artificial Sequence
  Synthetic
cggggagaaaggacaggcg

SEQ ID NO: 17595 - RNA, 21 nt, Artificial Sequence
  Synthetic
cgcggggagaaaggacaggcg

SEQ ID NO: 17596 - RNA, 22 nt, Artificial Sequence
  Synthetic
ccgcggggagaaaggacaggcg

SEQ ID NO: 17597 - RNA, 23 nt, Artificial Sequence
  Synthetic
cccgcggggagaaaggacaggcg

SEQ ID NO: 17598 - RNA, 24 nt, Artificial Sequence
  Synthetic
ucccgcggggagaaaggacaggcg

SEQ ID NO: 17599 - RNA, 18 nt, Artificial Sequence
  Synthetic
ucccgcaugaccgccucg

SEQ ID NO: 17600 - RNA, 19 nt, Artificial Sequence
  Synthetic
uucccgcaugaccgccucg

SEQ ID NO: 17601 - RNA, 21 nt, Artificial Sequence
  Synthetic
uguucccgcaugaccgccucg

SEQ ID NO: 17602 - RNA, 22 nt, Artificial Sequence
  Synthetic
guguucccgcaugaccgccucg

SEQ ID NO: 17603 - RNA, 23 nt, Artificial Sequence
  Synthetic
cguguucccgcaugaccgccucg

SEQ ID NO: 17604 - RNA, 24 nt, Artificial Sequence
  Synthetic
gcguguucccgcaugaccgccucg

SEQ ID NO: 17605 - RNA, 18 nt, Artificial Sequence
  Synthetic
ccguagggggcggagucg

SEQ ID NO: 17606 - RNA, 19 nt, Artificial Sequence
  Synthetic
gccguagggggcggagucg

SEQ ID NO: 17607 - RNA, 21 nt, Artificial Sequence
  Synthetic
gcgccguagggggcggagucg

SEQ ID NO: 17608 - RNA, 22 nt, Artificial Sequence
  Synthetic
agcgccguagggggcggagucg

SEQ ID NO: 17609 - RNA, 23 nt, Artificial Sequence
  Synthetic
gagcgccguagggggcggagucg

SEQ ID NO: 17610 - RNA, 24 nt, Artificial Sequence
  Synthetic
agagcgccguagggggcggagucg

SEQ ID NO: 17611 - RNA, 18 nt, Artificial Sequence
  Synthetic
ccaggcugacaucggucg

SEQ ID NO: 17612 - RNA, 19 nt, Artificial Sequence
  Synthetic
cccaggcugacaucggucg

SEQ ID NO: 17613 - RNA, 21 nt, Artificial Sequence
  Synthetic
cccccaggcugacaucggucg

SEQ ID NO: 17614 - RNA, 22 nt, Artificial Sequence
  Synthetic
ucccccaggcugacaucggucg

SEQ ID NO: 17615 - RNA, 23 nt, Artificial Sequence
  Synthetic
gucccccaggcugacaucggucg

SEQ ID NO: 17616 - RNA, 24 nt, Artificial Sequence
  Synthetic
cgucccccaggcugacaucggucg

SEQ ID NO: 17617 - RNA, 18 nt, Artificial Sequence
  Synthetic
cagaggcagucaaacagg

SEQ ID NO: 17618 - RNA, 19 nt, Artificial Sequence
  Synthetic
acagaggcagucaaacagg

SEQ ID NO: 17619 - RNA, 21 nt, Artificial Sequence
  Synthetic
caacagaggcagucaaacagg

SEQ ID NO: 17620 - RNA, 22 nt, Artificial Sequence
  Synthetic
gcaacagaggcagucaaacagg

SEQ ID NO: 17621 - RNA, 23 nt, Artificial Sequence
  Synthetic
cgcaacagaggcagucaaacagg

SEQ ID NO: 17622 - RNA, 24 nt, Artificial Sequence
  Synthetic
ucgcaacagaggcagucaaacagg

SEQ ID NO: 17623 - RNA, 18 nt, Artificial Sequence
  Synthetic
gccugguugccaugcagg

SEQ ID NO: 17624 - RNA, 19 nt, Artificial Sequence
  Synthetic
ggccugguugccaugcagg

SEQ ID NO: 17625 - RNA, 21 nt, Artificial Sequence
  Synthetic
cgggccugguugccaugcagg

SEQ ID NO: 17626 - RNA, 22 nt, Artificial Sequence
  Synthetic
gcgggccugguugccaugcagg

SEQ ID NO: 17627 - RNA, 23 nt, Artificial Sequence
  Synthetic
cgcgggccugguugccaugcagg

SEQ ID NO: 17628 - RNA, 24 nt, Artificial Sequence
  Synthetic
gcgcgggccugguugccaugcagg

SEQ ID NO: 17629 - RNA, 18 nt, Artificial Sequence
  Synthetic
gcaugaccgccucggagg

SEQ ID NO: 17630 - RNA, 19 nt, Artificial Sequence
  Synthetic
cgcaugaccgccucggagg

SEQ ID NO: 17631 - RNA, 21 nt, Artificial Sequence
  Synthetic
cccgcaugaccgccucggagg

SEQ ID NO: 17632 - RNA, 22 nt, Artificial Sequence
  Synthetic
ucccgcaugaccgccucggagg

SEQ ID NO: 17633 - RNA, 23 nt, Artificial Sequence
  Synthetic
uucccgcaugaccgccucggagg

SEQ ID NO: 17634 - RNA, 24 nt, Artificial Sequence
  Synthetic
guucccgcaugaccgccucggagg

SEQ ID NO: 17635 - RNA, 18 nt, Artificial Sequence
  Synthetic
cccccaggcugacaucgg

SEQ ID NO: 17636 - RNA, 19 nt, Artificial Sequence
  Synthetic
ucccccaggcugacaucgg

SEQ ID NO: 17637 - RNA, 21 nt, Artificial Sequence
  Synthetic
cgucccccaggcugacaucgg

SEQ ID NO: 17638 - RNA, 22 nt, Artificial Sequence
  Synthetic
ucgucccccaggcugacaucgg

SEQ ID NO: 17639 - RNA, 23 nt, Artificial Sequence
  Synthetic
cucgucccccaggcugacaucgg

SEQ ID NO: 17640 - RNA, 24 nt, Artificial Sequence
  Synthetic
gcucgucccccaggcugacaucgg

SEQ ID NO: 17641 - RNA, 18 nt, Artificial Sequence
  Synthetic
caggcugacaucggucgg

SEQ ID NO: 17642 - RNA, 19 nt, Artificial Sequence
  Synthetic
ccaggcugacaucggucgg

SEQ ID NO: 17643 - RNA, 21 nt, Artificial Sequence
  Synthetic
ccccaggcugacaucggucgg

SEQ ID NO: 17644 - RNA, 22 nt, Artificial Sequence
  Synthetic
cccccaggcugacaucggucgg

SEQ ID NO: 17645 - RNA, 23 nt, Artificial Sequence
  Synthetic
ucccccaggcugacaucggucgg

SEQ ID NO: 17646 - RNA, 24 nt, Artificial Sequence
  Synthetic
gucccccaggcugacaucggucgg

SEQ ID NO: 17647 - RNA, 18 nt, Artificial Sequence
  Synthetic
guugacgaacaugaaggg

SEQ ID NO: 17648 - RNA, 19 nt, Artificial Sequence
  Synthetic
cguugacgaacaugaaggg

SEQ ID NO: 17649 - RNA, 21 nt, Artificial Sequence
  Synthetic
uccguugacgaacaugaaggg

SEQ ID NO: 17650 - RNA, 22 nt, Artificial Sequence
  Synthetic
cuccguugacgaacaugaaggg

SEQ ID NO: 17651 - RNA, 23 nt, Artificial Sequence
  Synthetic
gcuccguugacgaacaugaaggg

SEQ ID NO: 17652 - RNA, 24 nt, Artificial Sequence
  Synthetic
cgcuccguugacgaacaugaaggg

SEQ ID NO: 17653 - RNA, 18 nt, Artificial Sequence
  Synthetic
gcagguaccgguacaggg

SEQ ID NO: 17654 - RNA, 19 nt, Artificial Sequence
  Synthetic
cgcagguaccgguacaggg

SEQ ID NO: 17655 - RNA, 21 nt, Artificial Sequence
  Synthetic
cgcgcagguaccgguacaggg

SEQ ID NO: 17656 - RNA, 22 nt, Artificial Sequence
  Synthetic
gcgcgcagguaccgguacaggg

SEQ ID NO: 17657 - RNA, 23 nt, Artificial Sequence
  Synthetic
ggcgcgcagguaccgguacaggg

SEQ ID NO: 17658 - RNA, 24 nt, Artificial Sequence
  Synthetic
uggcgcgcagguaccgguacaggg

SEQ ID NO: 17659 - RNA, 18 nt, Artificial Sequence
  Synthetic
ccugguugccaugcaggg

SEQ ID NO: 17660 - RNA, 19 nt, Artificial Sequence
  Synthetic
gccugguugccaugcaggg

SEQ ID NO: 17661 - RNA, 21 nt, Artificial Sequence
  Synthetic
gggccugguugccaugcaggg

SEQ ID NO: 17662 - RNA, 22 nt, Artificial Sequence
  Synthetic
cgggccugguugccaugcaggg

SEQ ID NO: 17663 - RNA, 23 nt, Artificial Sequence
  Synthetic
gcgggccugguugccaugcaggg

SEQ ID NO: 17664 - RNA, 24 nt, Artificial Sequence
  Synthetic
cgcgggccugguugccaugcaggg

SEQ ID NO: 17665 - RNA, 18 nt, Artificial Sequence
  Synthetic
gcgcgugugucccgcggg

SEQ ID NO: 17666 - RNA, 19 nt, Artificial Sequence
  Synthetic
ugcgcgugugucccgcggg

SEQ ID NO: 17667 - RNA, 21 nt, Artificial Sequence
  Synthetic
ucugcgcgugugucccgcggg

SEQ ID NO: 17668 - RNA, 22 nt, Artificial Sequence
  Synthetic
gucugcgcgugugucccgcggg

SEQ ID NO: 17669 - RNA, 23 nt, Artificial Sequence
  Synthetic
agucugcgcgugugucccgcggg

SEQ ID NO: 17670 - RNA, 24 nt, Artificial Sequence
  Synthetic
cagucugcgcgugugucccgcggg

SEQ ID NO: 17671 - RNA, 18 nt, Artificial Sequence
  Synthetic
uccagagcgccguagggg

SEQ ID NO: 17672 - RNA, 19 nt, Artificial Sequence
  Synthetic
auccagagcgccguagggg

SEQ ID NO: 17673 - RNA, 21 nt, Artificial Sequence
  Synthetic
auauccagagcgccguagggg

SEQ ID NO: 17674 - RNA, 22 nt, Artificial Sequence
  Synthetic
cauauccagagcgccguagggg

SEQ ID NO: 17675 - RNA, 23 nt, Artificial Sequence
  Synthetic
ccauauccagagcgccguagggg

SEQ ID NO: 17676 - RNA, 24 nt, Artificial Sequence
  Synthetic
gccauauccagagcgccguagggg

SEQ ID NO: 17677 - RNA, 18 nt, Artificial Sequence
  Synthetic
gguugccaugcagggugg

SEQ ID NO: 17678 - RNA, 19 nt, Artificial Sequence
  Synthetic
ugguugccaugcagggugg

SEQ ID NO: 17679 - RNA, 21 nt, Artificial Sequence
  Synthetic
ccugguugccaugcagggugg

SEQ ID NO: 17680 - RNA, 22 nt, Artificial Sequence
  Synthetic
gccugguugccaugcagggugg

SEQ ID NO: 17681 - RNA, 23 nt, Artificial Sequence
  Synthetic
ggccugguugccaugcagggugg

SEQ ID NO: 17682 - RNA, 24 nt, Artificial Sequence
  Synthetic
gggccugguugccaugcagggugg

SEQ ID NO: 17683 - RNA, 18 nt, Artificial Sequence
  Synthetic
gcuccguugacgaacaug

SEQ ID NO: 17684 - RNA, 19 nt, Artificial Sequence
  Synthetic
cgcuccguugacgaacaug

SEQ ID NO: 17685 - RNA, 21 nt, Artificial Sequence
  Synthetic
agcgcuccguugacgaacaug

SEQ ID NO: 17686 - RNA, 22 nt, Artificial Sequence
  Synthetic
gagcgcuccguugacgaacaug

SEQ ID NO: 17687 - RNA, 23 nt, Artificial Sequence
  Synthetic
ugagcgcuccguugacgaacaug

SEQ ID NO: 17688 - RNA, 24 nt, Artificial Sequence
  Synthetic
gugagcgcuccguugacgaacaug

SEQ ID NO: 17689 - RNA, 18 nt, Artificial Sequence
  Synthetic
cgccuggcggugcagcug

SEQ ID NO: 17690 - RNA, 19 nt, Artificial Sequence
  Synthetic
gcgccuggcggugcagcug

SEQ ID NO: 17691 - RNA, 21 nt, Artificial Sequence
  Synthetic
gugcgccuggcggugcagcug

SEQ ID NO: 17692 - RNA, 22 nt, Artificial Sequence
  Synthetic
ugugcgccuggcggugcagcug

SEQ ID NO: 17693 - RNA, 23 nt, Artificial Sequence
  Synthetic
augugcgccuggcggugcagcug

SEQ ID NO: 17694 - RNA, 24 nt, Artificial Sequence
  Synthetic
caugugcgccuggcggugcagcug

SEQ ID NO: 17695 - RNA, 18 nt, Artificial Sequence
  Synthetic
acggugagcgcuccguug

SEQ ID NO: 17696 - RNA, 19 nt, Artificial Sequence
  Synthetic
gacggugagcgcuccguug

SEQ ID NO: 17697 - RNA, 21 nt, Artificial Sequence
  Synthetic
cggacggugagcgcuccguug

SEQ ID NO: 17698 - RNA, 22 nt, Artificial Sequence
  Synthetic
ccggacggugagcgcuccguug

SEQ ID NO: 17699 - RNA, 23 nt, Artificial Sequence
  Synthetic
cccggacggugagcgcuccguug

SEQ ID NO: 17700 - RNA, 24 nt, Artificial Sequence
  Synthetic
ccccggacggugagcgcuccguug

SEQ ID NO: 17701 - RNA, 18 nt, Artificial Sequence
  Synthetic
guucccgcaugaccgccu

SEQ ID NO: 17702 - RNA, 19 nt, Artificial Sequence
  Synthetic
uguucccgcaugaccgccu

SEQ ID NO: 17703 - RNA, 21 nt, Artificial Sequence
  Synthetic
cguguucccgcaugaccgccu

SEQ ID NO: 17704 - RNA, 22 nt, Artificial Sequence
  Synthetic
gcguguucccgcaugaccgccu

SEQ ID NO: 17705 - RNA, 23 nt, Artificial Sequence
  Synthetic
cgcguguucccgcaugaccgccu

SEQ ID NO: 17706 - RNA, 24 nt, Artificial Sequence
  Synthetic
acgcguguucccgcaugaccgccu

SEQ ID NO: 17707 - RNA, 18 nt, Artificial Sequence
  Synthetic
gccgccagccccgccucu

SEQ ID NO: 17708 - RNA, 19 nt, Artificial Sequence
  Synthetic
agccgccagccccgccucu

SEQ ID NO: 17709 - RNA, 21 nt, Artificial Sequence
  Synthetic
ggagccgccagccccgccucu

SEQ ID NO: 17710 - RNA, 22 nt, Artificial Sequence
  Synthetic
cggagccgccagccccgccucu

SEQ ID NO: 17711 - RNA, 23 nt, Artificial Sequence
  Synthetic
gcggagccgccagccccgccucu

SEQ ID NO: 17712 - RNA, 24 nt, Artificial Sequence
  Synthetic
cgcggagccgccagccccgccucu

SEQ ID NO: 17713 - RNA, 18 nt, Artificial Sequence
  Synthetic
ccauauccagagcgccgu

SEQ ID NO: 17714 - RNA, 19 nt, Artificial Sequence
  Synthetic
gccauauccagagcgccgu

SEQ ID NO: 17715 - RNA, 21 nt, Artificial Sequence
  Synthetic
cggccauauccagagcgccgu

SEQ ID NO: 17716 - RNA, 22 nt, Artificial Sequence
  Synthetic
ucggccauauccagagcgccgu

SEQ ID NO: 17717 - RNA, 23 nt, Artificial Sequence
  Synthetic
gucggccauauccagagcgccgu

SEQ ID NO: 17718 - RNA, 24 nt, Artificial Sequence
  Synthetic
agucggccauauccagagcgccgu

SEQ ID NO: 17719 - RNA, 18 nt, Artificial Sequence
  Synthetic
cguagggggcggagucgu

SEQ ID NO: 17720 - RNA, 19 nt, Artificial Sequence
  Synthetic
ccguagggggcggagucgu

SEQ ID NO: 17721 - RNA, 21 nt, Artificial Sequence
  Synthetic
cgccguagggggcggagucgu

SEQ ID NO: 17722 - RNA, 22 nt, Artificial Sequence
  Synthetic
gcgccguagggggcggagucgu

SEQ ID NO: 17723 - RNA, 23 nt, Artificial Sequence
  Synthetic
agcgccguagggggcggagucgu

SEQ ID NO: 17724 - RNA, 24 nt, Artificial Sequence
  Synthetic
gagcgccguagggggcggagucgu

SEQ ID NO: 17725 - RNA, 18 nt, Artificial Sequence
  Synthetic
cuucgggggcgucgucgu

SEQ ID NO: 17726 - RNA, 19 nt, Artificial Sequence
  Synthetic
ucuucgggggcgucgucgu

SEQ ID NO: 17727 - RNA, 21 nt, Artificial Sequence
  Synthetic
ccucuucgggggcgucgucgu

SEQ ID NO: 17728 - RNA, 22 nt, Artificial Sequence
  Synthetic
gccucuucgggggcgucgucgu

SEQ ID NO: 17729 - RNA, 23 nt, Artificial Sequence
  Synthetic
cgccucuucgggggcgucgucgu

SEQ ID NO: 17730 - RNA, 24 nt, Artificial Sequence
  Synthetic
ccgccucuucgggggcgucgucgu

SEQ ID NO: 17731 - RNA, 18 nt, Artificial Sequence
  Synthetic
ccccaggcugacaucggu

SEQ ID NO: 17732 - RNA, 19 nt, Artificial Sequence
  Synthetic
cccccaggcugacaucggu

SEQ ID NO: 17733 - RNA, 21 nt, Artificial Sequence
  Synthetic
gucccccaggcugacaucggu

SEQ ID NO: 17734 - RNA, 22 nt, Artificial Sequence
  Synthetic
cgucccccaggcugacaucggu

SEQ ID NO: 17735 - RNA, 23 nt, Artificial Sequence
  Synthetic
ucgucccccaggcugacaucggu

SEQ ID NO: 17736 - RNA, 24 nt, Artificial Sequence
  Synthetic
cucgucccccaggcugacaucggu

SEQ ID NO: 17737 - RNA, 18 nt, Artificial Sequence
  Synthetic
cugguugccaugcagggu

SEQ ID NO: 17738 - RNA, 19 nt, Artificial Sequence
  Synthetic
ccugguugccaugcagggu

SEQ ID NO: 17739 - RNA, 21 nt, Artificial Sequence
  Synthetic
ggccugguugccaugcagggu

SEQ ID NO: 17740 - RNA, 22 nt, Artificial Sequence
  Synthetic
gggccugguugccaugcagggu

SEQ ID NO: 17741 - RNA, 23 nt, Artificial Sequence
  Synthetic
cgggccugguugccaugcagggu

SEQ ID NO: 17742 - RNA, 24 nt, Artificial Sequence
  Synthetic
gcgggccugguugccaugcagggu

SEQ ID NO: 17743 - RNA, 18 nt, Artificial Sequence
  Synthetic
ccgccagccccgccucuu

SEQ ID NO: 17744 - RNA, 19 nt, Artificial Sequence
  Synthetic
gccgccagccccgccucuu

SEQ ID NO: 17745 - RNA, 21 nt, Artificial Sequence
  Synthetic
gagccgccagccccgccucuu

SEQ ID NO: 17746 - RNA, 22 nt, Artificial Sequence
  Synthetic
ggagccgccagccccgccucuu

SEQ ID NO: 17747 - RNA, 23 nt, Artificial Sequence
  Synthetic
cggagccgccagccccgccucuu

SEQ ID NO: 17748 - RNA, 24 nt, Artificial Sequence
  Synthetic
gcggagccgccagccccgccucuu

SEQ ID NO: 17749 - RNA, 18 nt, Artificial Sequence
  Synthetic
ccguccggggagugccaa

SEQ ID NO: 17750 - RNA, 19 nt, Artificial Sequence
  Synthetic
accguccggggagugccaa

SEQ ID NO: 17751 - RNA, 21 nt, Artificial Sequence
  Synthetic
ucaccguccggggagugccaa

SEQ ID NO: 17752 - RNA, 22 nt, Artificial Sequence
  Synthetic
cucaccguccggggagugccaa

SEQ ID NO: 17753 - RNA, 23 nt, Artificial Sequence
  Synthetic
gcucaccguccggggagugccaa

SEQ ID NO: 17754 - RNA, 24 nt, Artificial Sequence
  Synthetic
cgcucaccguccggggagugccaa

SEQ ID NO: 17755 - RNA, 18 nt, Artificial Sequence
  Synthetic
gcccuucauguucgucaa

SEQ ID NO: 17756 - RNA, 19 nt, Artificial Sequence
  Synthetic
agcccuucauguucgucaa

SEQ ID NO: 17757 - RNA, 21 nt, Artificial Sequence
  Synthetic
ccagcccuucauguucgucaa

SEQ ID NO: 17758 - RNA, 22 nt, Artificial Sequence
  Synthetic
uccagcccuucauguucgucaa

SEQ ID NO: 17759 - RNA, 23 nt, Artificial Sequence
  Synthetic
uuccagcccuucauguucgucaa

SEQ ID NO: 17760 - RNA, 24 nt, Artificial Sequence
  Synthetic
guuccagcccuucauguucgucaa

SEQ ID NO: 17761 - RNA, 18 nt, Artificial Sequence
  Synthetic
acaauuacgggucuacca

SEQ ID NO: 17762 - RNA, 19 nt, Artificial Sequence
  Synthetic
aacaauuacgggucuacca

SEQ ID NO: 17763 - RNA, 21 nt, Artificial Sequence
  Synthetic
aaaacaauuacgggucuacca

SEQ ID NO: 17764 - RNA, 22 nt, Artificial Sequence
  Synthetic
aaaaacaauuacgggucuacca

SEQ ID NO: 17765 - RNA, 23 nt, Artificial Sequence
  Synthetic
gaaaaacaauuacgggucuacca

SEQ ID NO: 17766 - RNA, 24 nt, Artificial Sequence
  Synthetic
cgaaaaacaauuacgggucuacca

SEQ ID NO: 17767 - RNA, 18 nt, Artificial Sequence
  Synthetic
agcccuucauguucguca

SEQ ID NO: 17768 - RNA, 19 nt, Artificial Sequence
  Synthetic
cagcccuucauguucguca

SEQ ID NO: 17769 - RNA, 21 nt, Artificial Sequence
  Synthetic
uccagcccuucauguucguca

SEQ ID NO: 17770 - RNA, 22 nt, Artificial Sequence
  Synthetic
uuccagcccuucauguucguca

SEQ ID NO: 17771 - RNA, 23 nt, Artificial Sequence
  Synthetic
guuccagcccuucauguucguca

SEQ ID NO: 17772 - RNA, 24 nt, Artificial Sequence
  Synthetic
uguuccagcccuucauguucguca

SEQ ID NO: 17773 - RNA, 18 nt, Artificial Sequence
  Synthetic
gguggguagggggcgcga

SEQ ID NO: 17774 - RNA, 19 nt, Artificial Sequence
  Synthetic
cgguggguagggggcgcga

SEQ ID NO: 17775 - RNA, 20 nt, Artificial Sequence
  Synthetic
acgguggguagggggcgcga

SEQ ID NO: 17776 - RNA, 21 nt, Artificial Sequence
  Synthetic
uacgguggguagggggcgcga

SEQ ID NO: 17777 - RNA, 22 nt, Artificial Sequence
  Synthetic
guacgguggguagggggcgcga

SEQ ID NO: 17778 - RNA, 23 nt, Artificial Sequence
  Synthetic
aguacgguggguagggggcgcga

SEQ ID NO: 17779 - RNA, 24 nt, Artificial Sequence
  Synthetic
gaguacgguggguagggggcgcga

SEQ ID NO: 17780 - RNA, 18 nt, Artificial Sequence
  Synthetic
ucuggacauguuggggga

SEQ ID NO: 17781 - RNA, 19 nt, Artificial Sequence
  Synthetic
aucuggacauguuggggga

SEQ ID NO: 17782 - RNA, 21 nt, Artificial Sequence
  Synthetic
cgaucuggacauguuggggga

SEQ ID NO: 17783 - RNA, 22 nt, Artificial Sequence
  Synthetic
ucgaucuggacauguuggggga

SEQ ID NO: 17784 - RNA, 23 nt, Artificial Sequence
  Synthetic
uucgaucuggacauguuggggga

SEQ ID NO: 17785 - RNA, 24 nt, Artificial Sequence
  Synthetic
uuucgaucuggacauguuggggga

SEQ ID NO: 17786 - RNA, 18 nt, Artificial Sequence
  Synthetic
gaucgcggacagguacua

SEQ ID NO: 17787 - RNA, 19 nt, Artificial Sequence
  Synthetic
cgaucgcggacagguacua

SEQ ID NO: 17788 - RNA, 21 nt, Artificial Sequence
  Synthetic
cacgaucgcggacagguacua

SEQ ID NO: 17789 - RNA, 22 nt, Artificial Sequence
  Synthetic
ccacgaucgcggacagguacua

SEQ ID NO: 17790 - RNA, 23 nt, Artificial Sequence
  Synthetic
gccacgaucgcggacagguacua

SEQ ID NO: 17791 - RNA, 24 nt, Artificial Sequence
  Synthetic
cgccacgaucgcggacagguacua

SEQ ID NO: 17792 - RNA, 18 nt, Artificial Sequence
  Synthetic
uggugcgcagcgcggcua

SEQ ID NO: 17793 - RNA, 19 nt, Artificial Sequence
  Synthetic
cuggugcgcagcgcggcua

SEQ ID NO: 17794 - RNA, 21 nt, Artificial Sequence
  Synthetic
cgcuggugcgcagcgcggcua

SEQ ID NO: 17795 - RNA, 22 nt, Artificial Sequence
  Synthetic
ccgcuggugcgcagcgcggcua

SEQ ID NO: 17796 - RNA, 23 nt, Artificial Sequence
  Synthetic
cccgcuggugcgcagcgcggcua

SEQ ID NO: 17797 - RNA, 24 nt, Artificial Sequence
  Synthetic
ucccgcuggugcgcagcgcggcua

SEQ ID NO: 17798 - RNA, 18 nt, Artificial Sequence
  Synthetic
ugacgaguacggugggua

SEQ ID NO: 17799 - RNA, 19 nt, Artificial Sequence
  Synthetic
uugacgaguacggugggua

SEQ ID NO: 17800 - RNA, 21 nt, Artificial Sequence
  Synthetic
aauugacgaguacggugggua

SEQ ID NO: 17801 - RNA, 22 nt, Artificial Sequence
  Synthetic
gaauugacgaguacggugggua

SEQ ID NO: 17802 - RNA, 23 nt, Artificial Sequence
  Synthetic
ggaauugacgaguacggugggua

SEQ ID NO: 17803 - RNA, 24 nt, Artificial Sequence
  Synthetic
uggaauugacgaguacggugggua

SEQ ID NO: 17804 - RNA, 18 nt, Artificial Sequence
  Synthetic
cgcggacgcgaucgcgac

SEQ ID NO: 17805 - RNA, 19 nt, Artificial Sequence
  Synthetic
gcgcggacgcgaucgcgac

SEQ ID NO: 17806 - RNA, 21 nt, Artificial Sequence
  Synthetic
augcgcggacgcgaucgcgac

SEQ ID NO: 17807 - RNA, 22 nt, Artificial Sequence
  Synthetic
caugcgcggacgcgaucgcgac

SEQ ID NO: 17808 - RNA, 23 nt, Artificial Sequence
  Synthetic
acaugcgcggacgcgaucgcgac

SEQ ID NO: 17809 - RNA, 24 nt, Artificial Sequence
  Synthetic
cacaugcgcggacgcgaucgcgac

SEQ ID NO: 17810 - RNA, 18 nt, Artificial Sequence
  Synthetic
gacugccucuguugcgac

SEQ ID NO: 17811 - RNA, 19 nt, Artificial Sequence
  Synthetic
ugacugccucuguugcgac

SEQ ID NO: 17812 - RNA, 21 nt, Artificial Sequence
  Synthetic
uuugacugccucuguugcgac

SEQ ID NO: 17813 - RNA, 22 nt, Artificial Sequence
  Synthetic
guuugacugccucuguugcgac

SEQ ID NO: 17814 - RNA, 23 nt, Artificial Sequence
  Synthetic
uguuugacugccucuguugcgac

SEQ ID NO: 17815 - RNA, 24 nt, Artificial Sequence
  Synthetic
cuguuugacugccucuguugcgac

SEQ ID NO: 17816 - RNA, 18 nt, Artificial Sequence
  Synthetic
gcggacgcgaucgcgacc

SEQ ID NO: 17817 - RNA, 19 nt, Artificial Sequence
  Synthetic
cgcggacgcgaucgcgacc

SEQ ID NO: 17818 - RNA, 21 nt, Artificial Sequence
  Synthetic
ugcgcggacgcgaucgcgacc

SEQ ID NO: 17819 - RNA, 22 nt, Artificial Sequence
  Synthetic
augcgcggacgcgaucgcgacc

SEQ ID NO: 17820 - RNA, 23 nt, Artificial Sequence
  Synthetic
caugcgcggacgcgaucgcgacc

SEQ ID NO: 17821 - RNA, 24 nt, Artificial Sequence
  Synthetic
acaugcgcggacgcgaucgcgacc

SEQ ID NO: 17822 - RNA, 18 nt, Artificial Sequence
  Synthetic
acugccucuguugcgacc

SEQ ID NO: 17823 - RNA, 19 nt, Artificial Sequence
  Synthetic
gacugccucuguugcgacc

SEQ ID NO: 17824 - RNA, 21 nt, Artificial Sequence
  Synthetic
uugacugccucuguugcgacc

SEQ ID NO: 17825 - RNA, 22 nt, Artificial Sequence
  Synthetic
uuugacugccucuguugcgacc

SEQ ID NO: 17826 - RNA, 23 nt, Artificial Sequence
  Synthetic
guuugacugccucuguugcgacc

SEQ ID NO: 17827 - RNA, 24 nt, Artificial Sequence
  Synthetic
uguuugacugccucuguugcgacc

SEQ ID NO: 17828 - RNA, 18 nt, Artificial Sequence
  Synthetic
ucgcggacagguacuacc

SEQ ID NO: 17829 - RNA, 19 nt, Artificial Sequence
  Synthetic
aucgcggacagguacuacc

SEQ ID NO: 17830 - RNA, 21 nt, Artificial Sequence
  Synthetic
cgaucgcggacagguacuacc

SEQ ID NO: 17831 - RNA, 22 nt, Artificial Sequence
  Synthetic
acgaucgcggacagguacuacc

SEQ ID NO: 17832 - RNA, 23 nt, Artificial Sequence
  Synthetic
cacgaucgcggacagguacuacc

SEQ ID NO: 17833 - RNA, 24 nt, Artificial Sequence
  Synthetic
ccacgaucgcggacagguacuacc

SEQ ID NO: 17834 - RNA, 18 nt, Artificial Sequence
  Synthetic
uguaucuauuuuugaccc

SEQ ID NO: 17835 - RNA, 19 nt, Artificial Sequence
  Synthetic
uuguaucuauuuuugaccc

SEQ ID NO: 17836 - RNA, 21 nt, Artificial Sequence
  Synthetic
auuuguaucuauuuuugaccc

SEQ ID NO: 17837 - RNA, 22 nt, Artificial Sequence
  Synthetic
cauuuguaucuauuuuugaccc

SEQ ID NO: 17838 - RNA, 23 nt, Artificial Sequence
  Synthetic
gcauuuguaucuauuuuugaccc

SEQ ID NO: 17839 - RNA, 24 nt, Artificial Sequence
  Synthetic
ugcauuuguaucuauuuuugaccc

SEQ ID NO: 17840 - RNA, 18 nt, Artificial Sequence
  Synthetic
cgccuguccuuucucccc

SEQ ID NO: 17841 - RNA, 19 nt, Artificial Sequence
  Synthetic
gcgccuguccuuucucccc

SEQ ID NO: 17842 - RNA, 21 nt, Artificial Sequence
  Synthetic
ccgcgccuguccuuucucccc

SEQ ID NO: 17843 - RNA, 22 nt, Artificial Sequence
  Synthetic
uccgcgccuguccuuucucccc

SEQ ID NO: 17844 - RNA, 23 nt, Artificial Sequence
  Synthetic
cuccgcgccuguccuuucucccc

SEQ ID NO: 17845 - RNA, 24 nt, Artificial Sequence
  Synthetic
gcuccgcgccuguccuuucucccc

SEQ ID NO: 17846 - RNA, 18 nt, Artificial Sequence
  Synthetic
ucccggacgacgacgccc

SEQ ID NO: 17847 - RNA, 19 nt, Artificial Sequence
  Synthetic
cucccggacgacgacgccc

SEQ ID NO: 17848 - RNA, 21 nt, Artificial Sequence
  Synthetic
aucucccggacgacgacgccc

SEQ ID NO: 17849 - RNA, 22 nt, Artificial Sequence
  Synthetic
gaucucccggacgacgacgccc

SEQ ID NO: 17850 - RNA, 23 nt, Artificial Sequence
  Synthetic
cgaucucccggacgacgacgccc

SEQ ID NO: 17851 - RNA, 24 nt, Artificial Sequence
  Synthetic
ucgaucucccggacgacgacgccc

SEQ ID NO: 17852 - RNA, 18 nt, Artificial Sequence
  Synthetic
agauguuuaccgaugccc

SEQ ID NO: 17853 - RNA, 19 nt, Artificial Sequence
  Synthetic
cagauguuuaccgaugccc

SEQ ID NO: 17854 - RNA, 21 nt, Artificial Sequence
  Synthetic
agcagauguuuaccgaugccc

SEQ ID NO: 17855 - RNA, 22 nt, Artificial Sequence
  Synthetic
gagcagauguuuaccgaugccc

SEQ ID NO: 17856 - RNA, 23 nt, Artificial Sequence
  Synthetic
ugagcagauguuuaccgaugccc

SEQ ID NO: 17857 - RNA, 24 nt, Artificial Sequence
  Synthetic
uugagcagauguuuaccgaugccc

SEQ ID NO: 17858 - RNA, 18 nt, Artificial Sequence
  Synthetic
ugggggacggggauuccc

SEQ ID NO: 17859 - RNA, 19 nt, Artificial Sequence
  Synthetic
uugggggacggggauuccc

SEQ ID NO: 17860 - RNA, 21 nt, Artificial Sequence
  Synthetic
uguugggggacggggauuccc

SEQ ID NO: 17861 - RNA, 22 nt, Artificial Sequence
  Synthetic
auguugggggacggggauuccc

SEQ ID NO: 17862 - RNA, 23 nt, Artificial Sequence
  Synthetic
cauguugggggacggggauuccc

SEQ ID NO: 17863 - RNA, 24 nt, Artificial Sequence
  Synthetic
acauguugggggacggggauuccc

SEQ ID NO: 17864 - RNA, 18 nt, Artificial Sequence
  Synthetic
ccccgaccgaugucagcc

SEQ ID NO: 17865 - RNA, 19 nt, Artificial Sequence
  Synthetic
cccccgaccgaugucagcc

SEQ ID NO: 17866 - RNA, 21 nt, Artificial Sequence
  Synthetic
cccccccgaccgaugucagcc

SEQ ID NO: 17867 - RNA, 22 nt, Artificial Sequence
  Synthetic
gcccccccgaccgaugucagcc

SEQ ID NO: 17868 - RNA, 23 nt, Artificial Sequence
  Synthetic
ggcccccccgaccgaugucagcc

SEQ ID NO: 17869 - RNA, 24 nt, Artificial Sequence
  Synthetic
cggcccccccgaccgaugucagcc

SEQ ID NO: 17870 - RNA, 18 nt, Artificial Sequence
  Synthetic
cgcggcuacggaggagcc

SEQ ID NO: 17871 - RNA, 19 nt, Artificial Sequence
  Synthetic
gcgcggcuacggaggagcc

SEQ ID NO: 17872 - RNA, 21 nt, Artificial Sequence
  Synthetic
cagcgcggcuacggaggagcc

SEQ ID NO: 17873 - RNA, 22 nt, Artificial Sequence
  Synthetic
gcagcgcggcuacggaggagcc

SEQ ID NO: 17874 - RNA, 23 nt, Artificial Sequence
  Synthetic
cgcagcgcggcuacggaggagcc

SEQ ID NO: 17875 - RNA, 24 nt, Artificial Sequence
  Synthetic
gcgcagcgcggcuacggaggagcc

SEQ ID NO: 17876 - RNA, 18 nt, Artificial Sequence
  Synthetic
acggagcgcucaccgucc

SEQ ID NO: 17877 - RNA, 19 nt, Artificial Sequence
  Synthetic
aacggagcgcucaccgucc

SEQ ID NO: 17878 - RNA, 21 nt, Artificial Sequence
  Synthetic
ucaacggagcgcucaccgucc

SEQ ID NO: 17879 - RNA, 22 nt, Artificial Sequence
  Synthetic
gucaacggagcgcucaccgucc

SEQ ID NO: 17880 - RNA, 23 nt, Artificial Sequence
  Synthetic
cgucaacggagcgcucaccgucc

SEQ ID NO: 17881 - RNA, 24 nt, Artificial Sequence
  Synthetic
ucgucaacggagcgcucaccgucc

SEQ ID NO: 17882 - RNA, 18 nt, Artificial Sequence
  Synthetic
uugggggacggggauucc

SEQ ID NO: 17883 - RNA, 19 nt, Artificial Sequence
  Synthetic
guugggggacggggauucc

SEQ ID NO: 17884 - RNA, 21 nt, Artificial Sequence
  Synthetic
auguugggggacggggauucc

SEQ ID NO: 17885 - RNA, 22 nt, Artificial Sequence
  Synthetic
cauguugggggacggggauucc

SEQ ID NO: 17886 - RNA, 23 nt, Artificial Sequence
  Synthetic
acauguugggggacggggauucc

SEQ ID NO: 17887 - RNA, 24 nt, Artificial Sequence
  Synthetic
gacauguugggggacggggauucc

SEQ ID NO: 17888 - RNA, 18 nt, Artificial Sequence
  Synthetic
cccccgaccgaugucagc

SEQ ID NO: 17889 - RNA, 19 nt, Artificial Sequence
  Synthetic
ccccccgaccgaugucagc

SEQ ID NO: 17890 - RNA, 21 nt, Artificial Sequence
  Synthetic
gcccccccgaccgaugucagc

SEQ ID NO: 17891 - RNA, 22 nt, Artificial Sequence
  Synthetic
ggcccccccgaccgaugucagc

SEQ ID NO: 17892 - RNA, 23 nt, Artificial Sequence
  Synthetic
cggcccccccgaccgaugucagc

SEQ ID NO: 17893 - RNA, 24 nt, Artificial Sequence
  Synthetic
acggcccccccgaccgaugucagc

SEQ ID NO: 17894 - RNA, 18 nt, Artificial Sequence
  Synthetic
gcgcggcuacggaggagc

SEQ ID NO: 17895 - RNA, 19 nt, Artificial Sequence
  Synthetic
agcgcggcuacggaggagc

SEQ ID NO: 17896 - RNA, 21 nt, Artificial Sequence
  Synthetic
gcagcgcggcuacggaggagc

SEQ ID NO: 17897 - RNA, 22 nt, Artificial Sequence
  Synthetic
cgcagcgcggcuacggaggagc

SEQ ID NO: 17898 - RNA, 23 nt, Artificial Sequence
  Synthetic
gcgcagcgcggcuacggaggagc

SEQ ID NO: 17899 - RNA, 24 nt, Artificial Sequence
  Synthetic
ugcgcagcgcggcuacggaggagc

SEQ ID NO: 17900 - RNA, 18 nt, Artificial Sequence
  Synthetic
gagcuccacuuagacggc

SEQ ID NO: 17901 - RNA, 19 nt, Artificial Sequence
  Synthetic
cgagcuccacuuagacggc

SEQ ID NO: 17902 - RNA, 21 nt, Artificial Sequence
  Synthetic
gacgagcuccacuuagacggc

SEQ ID NO: 17903 - RNA, 22 nt, Artificial Sequence
  Synthetic
ggacgagcuccacuuagacggc

SEQ ID NO: 17904 - RNA, 23 nt, Artificial Sequence
  Synthetic
gggacgagcuccacuuagacggc

SEQ ID NO: 17905 - RNA, 24 nt, Artificial Sequence
  Synthetic
ggggacgagcuccacuuagacggc

SEQ ID NO: 17906 - RNA, 18 nt, Artificial Sequence
  Synthetic
accgccaggcgcacaugc

SEQ ID NO: 17907 - RNA, 19 nt, Artificial Sequence
  Synthetic
caccgccaggcgcacaugc

SEQ ID NO: 17908 - RNA, 21 nt, Artificial Sequence
  Synthetic
ugcaccgccaggcgcacaugc

SEQ ID NO: 17909 - RNA, 22 nt, Artificial Sequence
  Synthetic
cugcaccgccaggcgcacaugc

SEQ ID NO: 17910 - RNA, 23 nt, Artificial Sequence
  Synthetic
gcugcaccgccaggcgcacaugc

SEQ ID NO: 17911 - RNA, 24 nt, Artificial Sequence
  Synthetic
agcugcaccgccaggcgcacaugc

SEQ ID NO: 17912 - RNA, 18 nt, Artificial Sequence
  Synthetic
ccuccgaggcggucaugc

SEQ ID NO: 17913 - RNA, 19 nt, Artificial Sequence
  Synthetic
cccuccgaggcggucaugc

SEQ ID NO: 17914 - RNA, 21 nt, Artificial Sequence
  Synthetic
cgcccuccgaggcggucaugc

SEQ ID NO: 17915 - RNA, 22 nt, Artificial Sequence
  Synthetic
ucgcccuccgaggcggucaugc

SEQ ID NO: 17916 - RNA, 23 nt, Artificial Sequence
  Synthetic
cucgcccuccgaggcggucaugc

SEQ ID NO: 17917 - RNA, 24 nt, Artificial Sequence
  Synthetic
ccucgcccuccgaggcggucaugc

SEQ ID NO: 17918 - RNA, 18 nt, Artificial Sequence
  Synthetic
ucgaggcccgccggcugc

SEQ ID NO: 17919 - RNA, 19 nt, Artificial Sequence
  Synthetic
aucgaggcccgccggcugc

SEQ ID NO: 17920 - RNA, 21 nt, Artificial Sequence
  Synthetic
caaucgaggcccgccggcugc

SEQ ID NO: 17921 - RNA, 22 nt, Artificial Sequence
  Synthetic
ccaaucgaggcccgccggcugc

SEQ ID NO: 17922 - RNA, 23 nt, Artificial Sequence
  Synthetic
gccaaucgaggcccgccggcugc

SEQ ID NO: 17923 - RNA, 24 nt, Artificial Sequence
  Synthetic
ugccaaucgaggcccgccggcugc

SEQ ID NO: 17924 - RNA, 18 nt, Artificial Sequence
  Synthetic
aauuacgggucuaccauc

SEQ ID NO: 17925 - RNA, 19 nt, Artificial Sequence
  Synthetic
caauuacgggucuaccauc

SEQ ID NO: 17926 - RNA, 21 nt, Artificial Sequence
  Synthetic
aacaauuacgggucuaccauc

SEQ ID NO: 17927 - RNA, 22 nt, Artificial Sequence
  Synthetic
aaacaauuacgggucuaccauc

SEQ ID NO: 17928 - RNA, 23 nt, Artificial Sequence
  Synthetic
aaaacaauuacgggucuaccauc

SEQ ID NO: 17929 - RNA, 24 nt, Artificial Sequence
  Synthetic
aaaaacaauuacgggucuaccauc

SEQ ID NO: 17930 - RNA, 18 nt, Artificial Sequence
  Synthetic
augcugcgcgccacgauc

SEQ ID NO: 17931 - RNA, 19 nt, Artificial Sequence
  Synthetic
aaugcugcgcgccacgauc

SEQ ID NO: 17932 - RNA, 21 nt, Artificial Sequence
  Synthetic
gaaaugcugcgcgccacgauc

SEQ ID NO: 17933 - RNA, 22 nt, Artificial Sequence
  Synthetic
agaaaugcugcgcgccacgauc

SEQ ID NO: 17934 - RNA, 23 nt, Artificial Sequence
  Synthetic
gagaaaugcugcgcgccacgauc

SEQ ID NO: 17935 - RNA, 24 nt, Artificial Sequence
  Synthetic
ggagaaaugcugcgcgccacgauc

SEQ ID NO: 17936 - RNA, 18 nt, Artificial Sequence
  Synthetic
gagggccugcucgaucuc

SEQ ID NO: 17937 - RNA, 19 nt, Artificial Sequence
  Synthetic
cgagggccugcucgaucuc

SEQ ID NO: 17938 - RNA, 21 nt, Artificial Sequence
  Synthetic
aucgagggccugcucgaucuc

SEQ ID NO: 17939 - RNA, 22 nt, Artificial Sequence
  Synthetic
caucgagggccugcucgaucuc

SEQ ID NO: 17940 - RNA, 23 nt, Artificial Sequence
  Synthetic
ccaucgagggccugcucgaucuc

SEQ ID NO: 17941 - RNA, 24 nt, Artificial Sequence
  Synthetic
accaucgagggccugcucgaucuc

SEQ ID NO: 17942 - RNA, 18 nt, Artificial Sequence
  Synthetic
aacggagcgcucaccguc

SEQ ID NO: 17943 - RNA, 19 nt, Artificial Sequence
  Synthetic
caacggagcgcucaccguc

SEQ ID NO: 17944 - RNA, 21 nt, Artificial Sequence
  Synthetic
gucaacggagcgcucaccguc

SEQ ID NO: 17945 - RNA, 22 nt, Artificial Sequence
  Synthetic
cgucaacggagcgcucaccguc

SEQ ID NO: 17946 - RNA, 23 nt, Artificial Sequence
  Synthetic
ucgucaacggagcgcucaccguc

SEQ ID NO: 17947 - RNA, 24 nt, Artificial Sequence
  Synthetic
uucgucaacggagcgcucaccguc

SEQ ID NO: 17948 - RNA, 18 nt, Artificial Sequence
  Synthetic
gggagcuaaaccacauuc

SEQ ID NO: 17949 - RNA, 19 nt, Artificial Sequence
  Synthetic
cgggagcuaaaccacauuc

SEQ ID NO: 17950 - RNA, 21 nt, Artificial Sequence
  Synthetic
ugcgggagcuaaaccacauuc

SEQ ID NO: 17951 - RNA, 22 nt, Artificial Sequence
  Synthetic
cugcgggagcuaaaccacauuc

SEQ ID NO: 17952 - RNA, 23 nt, Artificial Sequence
  Synthetic
gcugcgggagcuaaaccacauuc

SEQ ID NO: 17953 - RNA, 24 nt, Artificial Sequence
  Synthetic
ggcugcgggagcuaaaccacauuc

SEQ ID NO: 17954 - RNA, 18 nt, Artificial Sequence
  Synthetic
guguugauucgggcgaag

SEQ ID NO: 17955 - RNA, 19 nt, Artificial Sequence
  Synthetic
gguguugauucgggcgaag

SEQ ID NO: 17956 - RNA, 21 nt, Artificial Sequence
  Synthetic
augguguugauucgggcgaag

SEQ ID NO: 17957 - RNA, 22 nt, Artificial Sequence
  Synthetic
uaugguguugauucgggcgaag

SEQ ID NO: 17958 - RNA, 23 nt, Artificial Sequence
  Synthetic
uuaugguguugauucgggcgaag

SEQ ID NO: 17959 - RNA, 24 nt, Artificial Sequence
  Synthetic
uuuaugguguugauucgggcgaag

SEQ ID NO: 17960 - RNA, 18 nt, Artificial Sequence
  Synthetic
gacgacgcccccgaagag

SEQ ID NO: 17961 - RNA, 19 nt, Artificial Sequence
  Synthetic
cgacgacgcccccgaagag

SEQ ID NO: 17962 - RNA, 21 nt, Artificial Sequence
  Synthetic
gacgacgacgcccccgaagag

SEQ ID NO: 17963 - RNA, 22 nt, Artificial Sequence
  Synthetic
ggacgacgacgcccccgaagag

SEQ ID NO: 17964 - RNA, 23 nt, Artificial Sequence
  Synthetic
cggacgacgacgcccccgaagag

SEQ ID NO: 17965 - RNA, 24 nt, Artificial Sequence
  Synthetic
ccggacgacgacgcccccgaagag

SEQ ID NO: 17966 - RNA, 18 nt, Artificial Sequence
  Synthetic
acgagcuccacuuagacg

SEQ ID NO: 17967 - RNA, 19 nt, Artificial Sequence
  Synthetic
gacgagcuccacuuagacg

SEQ ID NO: 17968 - RNA, 21 nt, Artificial Sequence
  Synthetic
gggacgagcuccacuuagacg

SEQ ID NO: 17969 - RNA, 22 nt, Artificial Sequence
  Synthetic
ggggacgagcuccacuuagacg

SEQ ID NO: 17970 - RNA, 23 nt, Artificial Sequence
  Synthetic
gggggacgagcuccacuuagacg

SEQ ID NO: 17971 - RNA, 24 nt, Artificial Sequence
  Synthetic
ugggggacgagcuccacuuagacg

SEQ ID NO: 17972 - RNA, 18 nt, Artificial Sequence
  Synthetic
gugcgcagcgcggcuacg

SEQ ID NO: 17973 - RNA, 19 nt, Artificial Sequence
  Synthetic
ggugcgcagcgcggcuacg

SEQ ID NO: 17974 - RNA, 21 nt, Artificial Sequence
  Synthetic
cuggugcgcagcgcggcuacg

SEQ ID NO: 17975 - RNA, 22 nt, Artificial Sequence
  Synthetic
gcuggugcgcagcgcggcuacg

SEQ ID NO: 17976 - RNA, 23 nt, Artificial Sequence
  Synthetic
cgcuggugcgcagcgcggcuacg

SEQ ID NO: 17977 - RNA, 24 nt, Artificial Sequence
  Synthetic
ccgcuggugcgcagcgcggcuacg

SEQ ID NO: 17978 - RNA, 18 nt, Artificial Sequence
  Synthetic
uccuaugggccgcguacg

SEQ ID NO: 17979 - RNA, 19 nt, Artificial Sequence
  Synthetic
auccuaugggccgcguacg

SEQ ID NO: 17980 - RNA, 21 nt, Artificial Sequence
  Synthetic
agauccuaugggccgcguacg

SEQ ID NO: 17981 - RNA, 22 nt, Artificial Sequence
  Synthetic
gagauccuaugggccgcguacg

SEQ ID NO: 17982 - RNA, 23 nt, Artificial Sequence
  Synthetic
cgagauccuaugggccgcguacg

SEQ ID NO: 17983 - RNA, 24 nt, Artificial Sequence
  Synthetic
gcgagauccuaugggccgcguacg

SEQ ID NO: 17984 - RNA, 18 nt, Artificial Sequence
  Synthetic
cggacgacgacgcccccg

SEQ ID NO: 17985 - RNA, 19 nt, Artificial Sequence
  Synthetic
ccggacgacgacgcccccg

SEQ ID NO: 17986 - RNA, 21 nt, Artificial Sequence
  Synthetic
ucccggacgacgacgcccccg

SEQ ID NO: 17987 - RNA, 22 nt, Artificial Sequence
  Synthetic
cucccggacgacgacgcccccg

SEQ ID NO: 17988 - RNA, 23 nt, Artificial Sequence
  Synthetic
ucucccggacgacgacgcccccg

SEQ ID NO: 17989 - RNA, 24 nt, Artificial Sequence
  Synthetic
aucucccggacgacgacgcccccg

SEQ ID NO: 17990 - RNA, 18 nt, Artificial Sequence
  Synthetic
gccuguccuuucuccccg

SEQ ID NO: 17991 - RNA, 19 nt, Artificial Sequence
  Synthetic
cgccuguccuuucuccccg

SEQ ID NO: 17992 - RNA, 21 nt, Artificial Sequence
  Synthetic
cgcgccuguccuuucuccccg

SEQ ID NO: 17993 - RNA, 22 nt, Artificial Sequence
  Synthetic
ccgcgccuguccuuucuccccg

SEQ ID NO: 17994 - RNA, 23 nt, Artificial Sequence
  Synthetic
uccgcgccuguccuuucuccccg

SEQ ID NO: 17995 - RNA, 24 nt, Artificial Sequence
  Synthetic
cuccgcgccuguccuuucuccccg

SEQ ID NO: 17996 - RNA, 18 nt, Artificial Sequence
  Synthetic
acgacgcccccgaagagg

SEQ ID NO: 17997 - RNA, 19 nt, Artificial Sequence
  Synthetic
gacgacgcccccgaagagg

SEQ ID NO: 17998 - RNA, 21 nt, Artificial Sequence
  Synthetic
acgacgacgcccccgaagagg

SEQ ID NO: 17999 - RNA, 22 nt, Artificial Sequence
  Synthetic
gacgacgacgcccccgaagagg

SEQ ID NO: 18000 - RNA, 23 nt, Artificial Sequence
  Synthetic
ggacgacgacgcccccgaagagg

SEQ ID NO: 18001 - RNA, 24 nt, Artificial Sequence
  Synthetic
cggacgacgacgcccccgaagagg

SEQ ID NO: 18002 - RNA, 18 nt, Artificial Sequence
  Synthetic
ugcgcagcgcggcuacgg

SEQ ID NO: 18003 - RNA, 19 nt, Artificial Sequence
  Synthetic
gugcgcagcgcggcuacgg

SEQ ID NO: 18004 - RNA, 21 nt, Artificial Sequence
  Synthetic
uggugcgcagcgcggcuacgg

SEQ ID NO: 18005 - RNA, 22 nt, Artificial Sequence
  Synthetic
cuggugcgcagcgcggcuacgg

SEQ ID NO: 18006 - RNA, 23 nt, Artificial Sequence
  Synthetic
gcuggugcgcagcgcggcuacgg

SEQ ID NO: 18007 - RNA, 24 nt, Artificial Sequence
  Synthetic
cgcuggugcgcagcgcggcuacgg

SEQ ID NO: 18008 - RNA, 18 nt, Artificial Sequence
  Synthetic
uuuaugguguugauucgg

SEQ ID NO: 18009 - RNA, 19 nt, Artificial Sequence
  Synthetic
cuuuaugguguugauucgg

SEQ ID NO: 18010 - RNA, 21 nt, Artificial Sequence
  Synthetic
uacuuuaugguguugauucgg

SEQ ID NO: 18011 - RNA, 22 nt, Artificial Sequence
  Synthetic
guacuuuaugguguugauucgg

SEQ ID NO: 18012 - RNA, 23 nt, Artificial Sequence
  Synthetic
gguacuuuaugguguugauucgg

SEQ ID NO: 18013 - RNA, 24 nt, Artificial Sequence
  Synthetic
ggguacuuuaugguguugauucgg

SEQ ID NO: 18014 - RNA, 18 nt, Artificial Sequence
  Synthetic
gacggggauuccccgggg

SEQ ID NO: 18015 - RNA, 19 nt, Artificial Sequence
  Synthetic
ggacggggauuccccgggg

SEQ ID NO: 18016 - RNA, 21 nt, Artificial Sequence
  Synthetic
ggggacggggauuccccgggg

SEQ ID NO: 18017 - RNA, 22 nt, Artificial Sequence
  Synthetic
gggggacggggauuccccgggg

SEQ ID NO: 18018 - RNA, 23 nt, Artificial Sequence
  Synthetic
ugggggacggggauuccccgggg

SEQ ID NO: 18019 - RNA, 24 nt, Artificial Sequence
  Synthetic
uugggggacggggauuccccgggg

SEQ ID NO: 18020 - RNA, 18 nt, Artificial Sequence
  Synthetic
ccgaugucagccuggggg

SEQ ID NO: 18021 - RNA, 19 nt, Artificial Sequence
  Synthetic
accgaugucagccuggggg

SEQ ID NO: 18022 - RNA, 21 nt, Artificial Sequence
  Synthetic
cgaccgaugucagccuggggg

SEQ ID NO: 18023 - RNA, 22 nt, Artificial Sequence
  Synthetic
ccgaccgaugucagccuggggg

SEQ ID NO: 18024 - RNA, 23 nt, Artificial Sequence
  Synthetic
cccgaccgaugucagccuggggg

SEQ ID NO: 18025 - RNA, 24 nt, Artificial Sequence
  Synthetic
ccccgaccgaugucagccuggggg

SEQ ID NO: 18026 - RNA, 18 nt, Artificial Sequence
  Synthetic
aucuggacauguuggggg

SEQ ID NO: 18027 - RNA, 19 nt, Artificial Sequence
  Synthetic
gaucuggacauguuggggg

SEQ ID NO: 18028 - RNA, 21 nt, Artificial Sequence
  Synthetic
ucgaucuggacauguuggggg

SEQ ID NO: 18029 - RNA, 22 nt, Artificial Sequence
  Synthetic
uucgaucuggacauguuggggg

SEQ ID NO: 18030 - RNA, 23 nt, Artificial Sequence
  Synthetic
uuucgaucuggacauguuggggg

SEQ ID NO: 18031 - RNA, 24 nt, Artificial Sequence
  Synthetic
auuucgaucuggacauguuggggg

SEQ ID NO: 18032 - RNA, 18 nt, Artificial Sequence
  Synthetic
auugacgaguacgguggg

SEQ ID NO: 18033 - RNA, 19 nt, Artificial Sequence
  Synthetic
aauugacgaguacgguggg

SEQ ID NO: 18034 - RNA, 20 nt, Artificial Sequence
  Synthetic
gaauugacgaguacgguggg

SEQ ID NO: 18035 - RNA, 21 nt, Artificial Sequence
  Synthetic
ggaauugacgaguacgguggg

SEQ ID NO: 18036 - RNA, 22 nt, Artificial Sequence
  Synthetic
uggaauugacgaguacgguggg

SEQ ID NO: 18037 - RNA, 23 nt, Artificial Sequence
  Synthetic
uuggaauugacgaguacgguggg

SEQ ID NO: 18038 - RNA, 24 nt, Artificial Sequence
  Synthetic
cuuggaauugacgaguacgguggg

SEQ ID NO: 18039 - RNA, 18 nt, Artificial Sequence
  Synthetic
gacgcgaucgcgaccugg

SEQ ID NO: 18040 - RNA, 19 nt, Artificial Sequence
  Synthetic
ggacgcgaucgcgaccugg

SEQ ID NO: 18041 - RNA, 21 nt, Artificial Sequence
  Synthetic
gcggacgcgaucgcgaccugg

SEQ ID NO: 18042 - RNA, 22 nt, Artificial Sequence
  Synthetic
cgcggacgcgaucgcgaccugg

SEQ ID NO: 18043 - RNA, 23 nt, Artificial Sequence
  Synthetic
gcgcggacgcgaucgcgaccugg

SEQ ID NO: 18044 - RNA, 24 nt, Artificial Sequence
  Synthetic
ugcgcggacgcgaucgcgaccugg

SEQ ID NO: 18045 - RNA, 18 nt, Artificial Sequence
  Synthetic
gauuucgaucuggacaug

SEQ ID NO: 18046 - RNA, 19 nt, Artificial Sequence
  Synthetic
cgauuucgaucuggacaug

SEQ ID NO: 18047 - RNA, 21 nt, Artificial Sequence
  Synthetic
gacgauuucgaucuggacaug

SEQ ID NO: 18048 - RNA, 22 nt, Artificial Sequence
  Synthetic
agacgauuucgaucuggacaug

SEQ ID NO: 18049 - RNA, 23 nt, Artificial Sequence
  Synthetic
uagacgauuucgaucuggacaug

SEQ ID NO: 18050 - RNA, 24 nt, Artificial Sequence
  Synthetic
cuagacgauuucgaucuggacaug

SEQ ID NO: 18051 - RNA, 18 nt, Artificial Sequence
  Synthetic
cccuccgaggcggucaug

SEQ ID NO: 18052 - RNA, 19 nt, Artificial Sequence
  Synthetic
gcccuccgaggcggucaug

SEQ ID NO: 18053 - RNA, 21 nt, Artificial Sequence
  Synthetic
ucgcccuccgaggcggucaug

SEQ ID NO: 18054 - RNA, 22 nt, Artificial Sequence
  Synthetic
cucgcccuccgaggcggucaug

SEQ ID NO: 18055 - RNA, 23 nt, Artificial Sequence
  Synthetic
ccucgcccuccgaggcggucaug

SEQ ID NO: 18056 - RNA, 24 nt, Artificial Sequence
  Synthetic
accucgcccuccgaggcggucaug

SEQ ID NO: 18057 - RNA, 18 nt, Artificial Sequence
  Synthetic
ugccucuguugcgaccug

SEQ ID NO: 18058 - RNA, 19 nt, Artificial Sequence
  Synthetic
cugccucuguugcgaccug

SEQ ID NO: 18059 - RNA, 21 nt, Artificial Sequence
  Synthetic
gacugccucuguugcgaccug

SEQ ID NO: 18060 - RNA, 22 nt, Artificial Sequence
  Synthetic
ugacugccucuguugcgaccug

SEQ ID NO: 18061 - RNA, 23 nt, Artificial Sequence
  Synthetic
uugacugccucuguugcgaccug

SEQ ID NO: 18062 - RNA, 24 nt, Artificial Sequence
  Synthetic
uuugacugccucuguugcgaccug

SEQ ID NO: 18063 - RNA, 18 nt, Artificial Sequence
  Synthetic
ccgaccgaugucagccug

SEQ ID NO: 18064 - RNA, 19 nt, Artificial Sequence
  Synthetic
cccgaccgaugucagccug

SEQ ID NO: 18065 - RNA, 21 nt, Artificial Sequence
  Synthetic
cccccgaccgaugucagccug

SEQ ID NO: 18066 - RNA, 22 nt, Artificial Sequence
  Synthetic
ccccccgaccgaugucagccug

SEQ ID NO: 18067 - RNA, 23 nt, Artificial Sequence
  Synthetic
cccccccgaccgaugucagccug

SEQ ID NO: 18068 - RNA, 24 nt, Artificial Sequence
  Synthetic
gcccccccgaccgaugucagccug

SEQ ID NO: 18069 - RNA, 18 nt, Artificial Sequence
  Synthetic
aucgaggcccgccggcug

SEQ ID NO: 18070 - RNA, 19 nt, Artificial Sequence
  Synthetic
aaucgaggcccgccggcug

SEQ ID NO: 18071 - RNA, 21 nt, Artificial Sequence
  Synthetic
ccaaucgaggcccgccggcug

SEQ ID NO: 18072 - RNA, 22 nt, Artificial Sequence
  Synthetic
gccaaucgaggcccgccggcug

SEQ ID NO: 18073 - RNA, 23 nt, Artificial Sequence
  Synthetic
ugccaaucgaggcccgccggcug

SEQ ID NO: 18074 - RNA, 24 nt, Artificial Sequence
  Synthetic
gugccaaucgaggcccgccggcug

SEQ ID NO: 18075 - RNA, 18 nt, Artificial Sequence
  Synthetic
uucgaucuggacauguug

SEQ ID NO: 18076 - RNA, 19 nt, Artificial Sequence
  Synthetic
uuucgaucuggacauguug

SEQ ID NO: 18077 - RNA, 21 nt, Artificial Sequence
  Synthetic
gauuucgaucuggacauguug

SEQ ID NO: 18078 - RNA, 22 nt, Artificial Sequence
  Synthetic
cgauuucgaucuggacauguug

SEQ ID NO: 18079 - RNA, 23 nt, Artificial Sequence
  Synthetic
acgauuucgaucuggacauguug

SEQ ID NO: 18080 - RNA, 24 nt, Artificial Sequence
  Synthetic
gacgauuucgaucuggacauguug

SEQ ID NO: 18081 - RNA, 18 nt, Artificial Sequence
  Synthetic
gcccuccgaggcggucau

SEQ ID NO: 18082 - RNA, 19 nt, Artificial Sequence
  Synthetic
cgcccuccgaggcggucau

SEQ ID NO: 18083 - RNA, 21 nt, Artificial Sequence
  Synthetic
cucgcccuccgaggcggucau

SEQ ID NO: 18084 - RNA, 22 nt, Artificial Sequence
  Synthetic
ccucgcccuccgaggcggucau

SEQ ID NO: 18085 - RNA, 23 nt, Artificial Sequence
  Synthetic
accucgcccuccgaggcggucau

SEQ ID NO: 18086 - RNA, 24 nt, Artificial Sequence
  Synthetic
gaccucgcccuccgaggcggucau

SEQ ID NO: 18087 - RNA, 18 nt, Artificial Sequence
  Synthetic
gcgcuagacgauuucgau

SEQ ID NO: 18088 - RNA, 19 nt, Artificial Sequence
  Synthetic
cgcgcuagacgauuucgau

SEQ ID NO: 18089 - RNA, 21 nt, Artificial Sequence
  Synthetic
gacgcgcuagacgauuucgau

SEQ ID NO: 18090 - RNA, 22 nt, Artificial Sequence
  Synthetic
cgacgcgcuagacgauuucgau

SEQ ID NO: 18091 - RNA, 23 nt, Artificial Sequence
  Synthetic
ccgacgcgcuagacgauuucgau

SEQ ID NO: 18092 - RNA, 24 nt, Artificial Sequence
  Synthetic
gccgacgcgcuagacgauuucgau

SEQ ID NO: 18093 - RNA, 18 nt, Artificial Sequence
  Synthetic
guacuuuaugguguugau

SEQ ID NO: 18094 - RNA, 19 nt, Artificial Sequence
  Synthetic
gguacuuuaugguguugau

SEQ ID NO: 18095 - RNA, 21 nt, Artificial Sequence
  Synthetic
uggguacuuuaugguguugau

SEQ ID NO: 18096 - RNA, 22 nt, Artificial Sequence
  Synthetic
cuggguacuuuaugguguugau

SEQ ID NO: 18097 - RNA, 23 nt, Artificial Sequence
  Synthetic
ucuggguacuuuaugguguugau

SEQ ID NO: 18098 - RNA, 24 nt, Artificial Sequence
  Synthetic
cucuggguacuuuaugguguugau

SEQ ID NO: 18099 - RNA, 18 nt, Artificial Sequence
  Synthetic
cggacgcgaucgcgaccu

SEQ ID NO: 18100 - RNA, 19 nt, Artificial Sequence
  Synthetic
gcggacgcgaucgcgaccu

SEQ ID NO: 18101 - RNA, 21 nt, Artificial Sequence
  Synthetic
gcgcggacgcgaucgcgaccu

SEQ ID NO: 18102 - RNA, 22 nt, Artificial Sequence
  Synthetic
ugcgcggacgcgaucgcgaccu

SEQ ID NO: 18103 - RNA, 23 nt, Artificial Sequence
  Synthetic
augcgcggacgcgaucgcgaccu

SEQ ID NO: 18104 - RNA, 24 nt, Artificial Sequence
  Synthetic
caugcgcggacgcgaucgcgaccu

SEQ ID NO: 18105 - RNA, 18 nt, Artificial Sequence
  Synthetic
gcuucacgaccucgcccu

SEQ ID NO: 18106 - RNA, 19 nt, Artificial Sequence
  Synthetic
agcuucacgaccucgcccu

SEQ ID NO: 18107 - RNA, 21 nt, Artificial Sequence
  Synthetic
ccagcuucacgaccucgcccu

SEQ ID NO: 18108 - RNA, 22 nt, Artificial Sequence
  Synthetic
uccagcuucacgaccucgcccu

SEQ ID NO: 18109 - RNA, 23 nt, Artificial Sequence
  Synthetic
uuccagcuucacgaccucgcccu

SEQ ID NO: 18110 - RNA, 24 nt, Artificial Sequence
  Synthetic
auuccagcuucacgaccucgcccu

SEQ ID NO: 18111 - RNA, 18 nt, Artificial Sequence
  Synthetic
cccgaccgaugucagccu

SEQ ID NO: 18112 - RNA, 19 nt, Artificial Sequence
  Synthetic
ccccgaccgaugucagccu

SEQ ID NO: 18113 - RNA, 21 nt, Artificial Sequence
  Synthetic
ccccccgaccgaugucagccu

SEQ ID NO: 18114 - RNA, 22 nt, Artificial Sequence
  Synthetic
cccccccgaccgaugucagccu

SEQ ID NO: 18115 - RNA, 23 nt, Artificial Sequence
  Synthetic
gcccccccgaccgaugucagccu

SEQ ID NO: 18116 - RNA, 24 nt, Artificial Sequence
  Synthetic
ggcccccccgaccgaugucagccu

SEQ ID NO: 18117 - RNA, 18 nt, Artificial Sequence
  Synthetic
uuugacccgcgagauccu

SEQ ID NO: 18118 - RNA, 19 nt, Artificial Sequence
  Synthetic
uuuugacccgcgagauccu

SEQ ID NO: 18119 - RNA, 21 nt, Artificial Sequence
  Synthetic
auuuuugacccgcgagauccu

SEQ ID NO: 18120 - RNA, 22 nt, Artificial Sequence
  Synthetic
uauuuuugacccgcgagauccu

SEQ ID NO: 18121 - RNA, 23 nt, Artificial Sequence
  Synthetic
cuauuuuugacccgcgagauccu

SEQ ID NO: 18122 - RNA, 24 nt, Artificial Sequence
  Synthetic
ucuauuuuugacccgcgagauccu

SEQ ID NO: 18123 - RNA, 18 nt, Artificial Sequence
  Synthetic
aaucgaggcccgccggcu

SEQ ID NO: 18124 - RNA, 19 nt, Artificial Sequence
  Synthetic
caaucgaggcccgccggcu

SEQ ID NO: 18125 - RNA, 21 nt, Artificial Sequence
  Synthetic
gccaaucgaggcccgccggcu

SEQ ID NO: 18126 - RNA, 22 nt, Artificial Sequence
  Synthetic
ugccaaucgaggcccgccggcu

SEQ ID NO: 18127 - RNA, 23 nt, Artificial Sequence
  Synthetic
gugccaaucgaggcccgccggcu

SEQ ID NO: 18128 - RNA, 24 nt, Artificial Sequence
  Synthetic
agugccaaucgaggcccgccggcu

SEQ ID NO: 18129 - RNA, 18 nt, Artificial Sequence
  Synthetic
cuggugcgcagcgcggcu

SEQ ID NO: 18130 - RNA, 19 nt, Artificial Sequence
  Synthetic
gcuggugcgcagcgcggcu

SEQ ID NO: 18131 - RNA, 21 nt, Artificial Sequence
  Synthetic
ccgcuggugcgcagcgcggcu

SEQ ID NO: 18132 - RNA, 22 nt, Artificial Sequence
  Synthetic
cccgcuggugcgcagcgcggcu

SEQ ID NO: 18133 - RNA, 23 nt, Artificial Sequence
  Synthetic
ucccgcuggugcgcagcgcggcu

SEQ ID NO: 18134 - RNA, 24 nt, Artificial Sequence
  Synthetic
cucccgcuggugcgcagcgcggcu

SEQ ID NO: 18135 - RNA, 18 nt, Artificial Sequence
  Synthetic
auauggccgacuucgagu

SEQ ID NO: 18136 - RNA, 19 nt, Artificial Sequence
  Synthetic
gauauggccgacuucgagu

SEQ ID NO: 18137 - RNA, 21 nt, Artificial Sequence
  Synthetic
uggauauggccgacuucgagu

SEQ ID NO: 18138 - RNA, 22 nt, Artificial Sequence
  Synthetic
cuggauauggccgacuucgagu

SEQ ID NO: 18139 - RNA, 23 nt, Artificial Sequence
  Synthetic
ucuggauauggccgacuucgagu

SEQ ID NO: 18140 - RNA, 24 nt, Artificial Sequence
  Synthetic
cucuggauauggccgacuucgagu

SEQ ID NO: 18141 - RNA, 18 nt, Artificial Sequence
  Synthetic
caacggagcgcucaccgu

SEQ ID NO: 18142 - RNA, 19 nt, Artificial Sequence
  Synthetic
ucaacggagcgcucaccgu

SEQ ID NO: 18143 - RNA, 21 nt, Artificial Sequence
  Synthetic
cgucaacggagcgcucaccgu

SEQ ID NO: 18144 - RNA, 22 nt, Artificial Sequence
  Synthetic
ucgucaacggagcgcucaccgu

SEQ ID NO: 18145 - RNA, 23 nt, Artificial Sequence
  Synthetic
uucgucaacggagcgcucaccgu

SEQ ID NO: 18146 - RNA, 24 nt, Artificial Sequence
  Synthetic
guucgucaacggagcgcucaccgu

SEQ ID NO: 18147 - RNA, 18 nt, Artificial Sequence
  Synthetic
gcguacagccgcgcgcgu

SEQ ID NO: 18148 - RNA, 19 nt, Artificial Sequence
  Synthetic
cgcguacagccgcgcgcgu

SEQ ID NO: 18149 - RNA, 21 nt, Artificial Sequence
  Synthetic
cacgcguacagccgcgcgcgu

SEQ ID NO: 18150 - RNA, 22 nt, Artificial Sequence
  Synthetic
acacgcguacagccgcgcgcgu

SEQ ID NO: 18151 - RNA, 23 nt, Artificial Sequence
  Synthetic
aacacgcguacagccgcgcgcgu

SEQ ID NO: 18152 - RNA, 24 nt, Artificial Sequence
  Synthetic
gaacacgcguacagccgcgcgcgu

SEQ ID NO: 18153 - RNA, 18 nt, Artificial Sequence
  Synthetic
uugacgaguacggugggu

SEQ ID NO: 18154 - RNA, 19 nt, Artificial Sequence
  Synthetic
auugacgaguacggugggu

SEQ ID NO: 18155 - RNA, 21 nt, Artificial Sequence
  Synthetic
gaauugacgaguacggugggu

SEQ ID NO: 18156 - RNA, 22 nt, Artificial Sequence
  Synthetic
ggaauugacgaguacggugggu

SEQ ID NO: 18157 - RNA, 23 nt, Artificial Sequence
  Synthetic
uggaauugacgaguacggugggu

SEQ ID NO: 18158 - RNA, 24 nt, Artificial Sequence
  Synthetic
uuggaauugacgaguacggugggu

SEQ ID NO: 18159 - RNA, 18 nt, Artificial Sequence
  Synthetic
auuucgaucuggacaugu

SEQ ID NO: 18160 - RNA, 19 nt, Artificial Sequence
  Synthetic
gauuucgaucuggacaugu

SEQ ID NO: 18161 - RNA, 21 nt, Artificial Sequence
  Synthetic
acgauuucgaucuggacaugu

SEQ ID NO: 18162 - RNA, 22 nt, Artificial Sequence
  Synthetic
gacgauuucgaucuggacaugu

SEQ ID NO: 18163 - RNA, 23 nt, Artificial Sequence
  Synthetic
agacgauuucgaucuggacaugu

SEQ ID NO: 18164 - RNA, 24 nt, Artificial Sequence
  Synthetic
uagacgauuucgaucuggacaugu

SEQ ID NO: 18165 - RNA, 18 nt, Artificial Sequence
  Synthetic
uuucgaucuggacauguu

SEQ ID NO: 18166 - RNA, 19 nt, Artificial Sequence
  Synthetic
auuucgaucuggacauguu

SEQ ID NO: 18167 - RNA, 21 nt, Artificial Sequence
  Synthetic
cgauuucgaucuggacauguu

SEQ ID NO: 18168 - RNA, 22 nt, Artificial Sequence
  Synthetic
acgauuucgaucuggacauguu

SEQ ID NO: 18169 - RNA, 23 nt, Artificial Sequence
  Synthetic
gacgauuucgaucuggacauguu

SEQ ID NO: 18170 - RNA, 24 nt, Artificial Sequence
  Synthetic
agacgauuucgaucuggacauguu

SEQ ID NO: 18171 - RNA, 17 nt, Artificial Sequence
  Synthetic
gcguggaagaaacgaga

SEQ ID NO: 18172 - RNA, 17 nt, Artificial Sequence
  Synthetic
cggcgacguggccuucc

SEQ ID NO: 18173 - RNA, 20 nt, Artificial Sequence
  Synthetic
ucggcguggaagaaacgaga

SEQ ID NO: 18174 - RNA, 20 nt, Artificial Sequence
  Synthetic
ccacggcgacguggccuucc

SEQ ID NO: 18175 - RNA, 17 nt, Artificial Sequence
  Synthetic
cgaaguuggacucguau

SEQ ID NO: 18176 - RNA, 20 nt, Artificial Sequence
  Synthetic
gggcgaaguuggacucguau

SEQ ID NO: 18177 - RNA, 20 nt, Artificial Sequence
  Synthetic
gauugguucugggggcacgc

SEQ ID NO: 18178 - RNA, 20 nt, Artificial Sequence
  Synthetic
gguucugggggcacgccggc

SEQ ID NO: 18179 - RNA, 20 nt, Artificial Sequence
  Synthetic
guucugggggcacgccggcg

SEQ ID NO: 18180 - RNA, 17 nt, Artificial Sequence
  Synthetic
agccgacagcccgguca

SEQ ID NO: 18181 - RNA, 17 nt, Artificial Sequence
  Synthetic
ucugggggcacgccggc

SEQ ID NO: 18182 - RNA, 20 nt, Artificial Sequence
  Synthetic
ucaaugucagucgccaugac

SEQ ID NO: 18183 - RNA, 20 nt, Artificial Sequence
  Synthetic
caaugucagucgccaugacc

SEQ ID NO: 18184 - RNA, 20 nt, Artificial Sequence
  Synthetic
cccagaaccaaucgcaaccc

SEQ ID NO: 18185 - RNA, 20 nt, Artificial Sequence
  Synthetic
cccgacggcagccgacagcc

SEQ ID NO: 18186 - RNA, 20 nt, Artificial Sequence
  Synthetic
cugucggcugccgucggggc

SEQ ID NO: 18187 - RNA, 20 nt, Artificial Sequence
  Synthetic
ccgggcugucggcugccguc

SEQ ID NO: 18188 - RNA, 20 nt, Artificial Sequence
  Synthetic
cccaggguugcgauugguuc

SEQ ID NO: 18189 - RNA, 20 nt, Artificial Sequence
  Synthetic
cgggcugucggcugccgucg

SEQ ID NO: 18190 - RNA, 20 nt, Artificial Sequence
  Synthetic
ugguucugggggcacgccgg

SEQ ID NO: 18191 - RNA, 20 nt, Artificial Sequence
  Synthetic
uucugggggcacgccggcgg

SEQ ID NO: 18192 - RNA, 20 nt, Artificial Sequence
  Synthetic
aggguugcgauugguucugg

SEQ ID NO: 18193 - RNA, 20 nt, Artificial Sequence
  Synthetic
ccagaaccaaucgcaacccu

SEQ ID NO: 18194 - RNA, 20 nt, Artificial Sequence
  Synthetic
accgggcugucggcugccgu

SEQ ID NO: 18195 - RNA, 20 nt, Artificial Sequence
  Synthetic
agucgccaugaccgggcugu

SEQ ID NO: 18196 - RNA, 17 nt, Artificial Sequence
  Synthetic
gacggcagccgacagcc

SEQ ID NO: 18197 - RNA, 17 nt, Artificial Sequence
  Synthetic
ggcugucggcugccguc

SEQ ID NO: 18198 - RNA, 17 nt, Artificial Sequence
  Synthetic
gcugucggcugccgucg

SEQ ID NO: 18199 - RNA, 17 nt, Artificial Sequence
  Synthetic
guugcgauugguucugg

SEQ ID NO: 18200 - RNA, 17 nt, Artificial Sequence
  Synthetic
gggcugucggcugccgu

SEQ ID NO: 18201 - RNA, 20 nt, Artificial Sequence
  Synthetic
ggcagccgacagcccgguca

SEQ ID NO: 18202 - RNA, 17 nt, Artificial Sequence
  Synthetic
augucagucgccaugac

SEQ ID NO: 18203 - RNA, 17 nt, Artificial Sequence
  Synthetic
ugucagucgccaugacc

SEQ ID NO: 18204 - RNA, 17 nt, Artificial Sequence
  Synthetic
ugguucugggggcacgc

SEQ ID NO: 18205 - RNA, 17 nt, Artificial Sequence
  Synthetic
ucggcugccgucggggc

SEQ ID NO: 18206 - RNA, 17 nt, Artificial Sequence
  Synthetic
cugggggcacgccggcg

SEQ ID NO: 18207 - RNA, 17 nt, Artificial Sequence
  Synthetic
uucugggggcacgccgg

SEQ ID NO: 18208 - RNA, 17 nt, Artificial Sequence
  Synthetic
ugggggcacgccggcgg

SEQ ID NO: 18209 - RNA, 17 nt, Artificial Sequence
  Synthetic
cgccaugaccgggcugu

SEQ ID NO: 18210 - RNA, 20 nt, Artificial Sequence
  Synthetic
ccaggguugcgauugguucu

SEQ ID NO: 18211 - RNA, 17 nt, Artificial Sequence
  Synthetic
uuauuguaccuaaaaca

SEQ ID NO: 18212 - RNA, 17 nt, Artificial Sequence
  Synthetic
uuuauuguaccuaaaac

SEQ ID NO: 18213 - RNA, 17 nt, Artificial Sequence
  Synthetic
uugcaacucccuguuuu

SEQ ID NO: 18214 - RNA, 20 nt, Artificial Sequence
  Synthetic
uuuuuauuguaccuaaaaca

SEQ ID NO: 18215 - RNA, 20 nt, Artificial Sequence
  Synthetic
guuuuuauuguaccuaaaac

SEQ ID NO: 18216 - RNA, 20 nt, Artificial Sequence
  Synthetic
uuauugcaacucccuguuuu

SEQ ID NO: 18217 - RNA, 21 nt, Artificial Sequence
  Synthetic
gcgucugggugcuggguacgc

SEQ ID NO: 18218 - RNA, 22 nt, Artificial Sequence
  Synthetic
ggcgucugggugcuggguacgc

SEQ ID NO: 18219 - RNA, 24 nt, Artificial Sequence
  Synthetic
gaggcgucugggugcuggguacgc

SEQ ID NO: 18220 - RNA, 19 nt, Artificial Sequence
  Synthetic
guucugggggcacgccggc

SEQ ID NO: 18221 - RNA, 24 nt, Artificial Sequence
  Synthetic
gauugguucugggggcacgccggc

SEQ ID NO: 18222 - RNA, 19 nt, Artificial Sequence
  Synthetic
gaccgccgggcgagcggcg

SEQ ID NO: 18223 - RNA, 20 nt, Artificial Sequence
  Synthetic
ggaccgccgggcgagcggcg

SEQ ID NO: 18224 - RNA, 22 nt, Artificial Sequence
  Synthetic
gcggaccgccgggcgagcggcg

SEQ ID NO: 18225 - RNA, 23 nt, Artificial Sequence
  Synthetic
ggcggaccgccgggcgagcggcg

SEQ ID NO: 18226 - RNA, 24 nt, Artificial Sequence
  Synthetic
gggcggaccgccgggcgagcggcg

SEQ ID NO: 18227 - RNA, 18 nt, Artificial Sequence
  Synthetic
ggcucuccgccggcucgg

SEQ ID NO: 18228 - RNA, 21 nt, Artificial Sequence
  Synthetic
ggcggcucuccgccggcucgg

SEQ ID NO: 18229 - RNA, 23 nt, Artificial Sequence
  Synthetic
gcggcggcucuccgccggcucgg

SEQ ID NO: 18230 - RNA, 18 nt, Artificial Sequence
  Synthetic
ggacgaggcgucugggug

SEQ ID NO: 18231 - RNA, 21 nt, Artificial Sequence
  Synthetic
gucggacgaggcgucugggug

SEQ ID NO: 18232 - RNA, 21 nt, Artificial Sequence
  Synthetic
gcuccgguccguccucuccgu

SEQ ID NO: 18233 - RNA, 22 nt, Artificial Sequence
  Synthetic
ggcuccgguccguccucuccgu

SEQ ID NO: 18234 - RNA, 19 nt, Artificial Sequence
  Synthetic
gcuccgucggacgaggcgu

SEQ ID NO: 18235 - RNA, 22 nt, Artificial Sequence
  Synthetic
gccgcuccgucggacgaggcgu

SEQ ID NO: 18236 - RNA, 18 nt, Artificial Sequence
  Synthetic
ggcugggcuuuggucggu

SEQ ID NO: 18237 - RNA, 21 nt, Artificial Sequence
  Synthetic
gcaggcugggcuuuggucggu

SEQ ID NO: 18238 - RNA, 22 nt, Artificial Sequence
  Synthetic
ggcaggcugggcuuuggucggu

SEQ ID NO: 18239 - RNA, 23 nt, Artificial Sequence
  Synthetic
gggcaggcugggcuuuggucggu

SEQ ID NO: 18240 - RNA, 21 nt, Artificial Sequence
  Synthetic
ggcggacgccgugggcgucgc

SEQ ID NO: 18241 - RNA, 23 nt, Artificial Sequence
  Synthetic
gcggcggacgccgugggcgucgc

SEQ ID NO: 18242 - RNA, 22 nt, Artificial Sequence
  Synthetic
gaccuggaaucggacagcagcg

SEQ ID NO: 18243 - RNA, 23 nt, Artificial Sequence
  Synthetic
gacgccgugggcgucgcaggggu

SEQ ID NO: 18244 - RNA, 24 nt, Artificial Sequence
  Synthetic
ggacgccgugggcgucgcaggggu

SEQ ID NO: 18245 - RNA, 23 nt, Artificial Sequence
  Synthetic
aggcgucugggugcuggguacgc

SEQ ID NO: 18246 - RNA, 18 nt, Artificial Sequence
  Synthetic
uucugggggcacgccggc

SEQ ID NO: 18247 - RNA, 21 nt, Artificial Sequence
  Synthetic
ugguucugggggcacgccggc

SEQ ID NO: 18248 - RNA, 22 nt, Artificial Sequence
  Synthetic
uugguucugggggcacgccggc

SEQ ID NO: 18249 - RNA, 23 nt, Artificial Sequence
  Synthetic
auugguucugggggcacgccggc

SEQ ID NO: 18250 - RNA, 18 nt, Artificial Sequence
  Synthetic
accgccgggcgagcggcg

SEQ ID NO: 18251 - RNA, 21 nt, Artificial Sequence
  Synthetic
cggaccgccgggcgagcggcg

SEQ ID NO: 18252 - RNA, 19 nt, Artificial Sequence
  Synthetic
cggcucuccgccggcucgg

SEQ ID NO: 18253 - RNA, 22 nt, Artificial Sequence
  Synthetic
cggcggcucuccgccggcucgg

SEQ ID NO: 18254 - RNA, 24 nt, Artificial Sequence
  Synthetic
cgcggcggcucuccgccggcucgg

SEQ ID NO: 18255 - RNA, 19 nt, Artificial Sequence
  Synthetic
cggacgaggcgucugggug

SEQ ID NO: 18256 - RNA, 22 nt, Artificial Sequence
  Synthetic
cgucggacgaggcgucugggug

SEQ ID NO: 18257 - RNA, 23 nt, Artificial Sequence
  Synthetic
ccgucggacgaggcgucugggug

SEQ ID NO: 18258 - RNA, 24 nt, Artificial Sequence
  Synthetic
uccgucggacgaggcgucugggug

SEQ ID NO: 18259 - RNA, 18 nt, Artificial Sequence
  Synthetic
ccgguccguccucuccgu

SEQ ID NO: 18260 - RNA, 19 nt, Artificial Sequence
  Synthetic
uccgguccguccucuccgu

SEQ ID NO: 18261 - RNA, 23 nt, Artificial Sequence
  Synthetic
cggcuccgguccguccucuccgu

SEQ ID NO: 18262 - RNA, 24 nt, Artificial Sequence
  Synthetic
ucggcuccgguccguccucuccgu

SEQ ID NO: 18263 - RNA, 18 nt, Artificial Sequence
  Synthetic
cuccgucggacgaggcgu

SEQ ID NO: 18264 - RNA, 20 nt, Artificial Sequence
  Synthetic
cgcuccgucggacgaggcgu

SEQ ID NO: 18265 - RNA, 21 nt, Artificial Sequence
  Synthetic
ccgcuccgucggacgaggcgu

SEQ ID NO: 18266 - RNA, 23 nt, Artificial Sequence
  Synthetic
ugccgcuccgucggacgaggcgu

SEQ ID NO: 18267 - RNA, 24 nt, Artificial Sequence
  Synthetic
cugccgcuccgucggacgaggcgu

SEQ ID NO: 18268 - RNA, 19 nt, Artificial Sequence
  Synthetic
aggcugggcuuuggucggu

SEQ ID NO: 18269 - RNA, 24 nt, Artificial Sequence
  Synthetic
cgggcaggcugggcuuuggucggu

SEQ ID NO: 18270 - RNA, 21 nt, Artificial Sequence
  Synthetic
acacacuguggggcgcugguu

SEQ ID NO: 18271 - RNA, 22 nt, Artificial Sequence
  Synthetic
cacacacuguggggcgcugguu

SEQ ID NO: 18272 - RNA, 23 nt, Artificial Sequence
  Synthetic
ccacacacuguggggcgcugguu

SEQ ID NO: 18273 - RNA, 24 nt, Artificial Sequence
  Synthetic
accacacacuguggggcgcugguu

SEQ ID NO: 18274 - RNA, 22 nt, Artificial Sequence
  Synthetic
cggcggacgccgugggcgucgc

SEQ ID NO: 18275 - RNA, 24 nt, Artificial Sequence
  Synthetic
cgcggcggacgccgugggcgucgc

SEQ ID NO: 18276 - RNA, 18 nt, Artificial Sequence
  Synthetic
uggaaucggacagcagcg

SEQ ID NO: 18277 - RNA, 19 nt, Artificial Sequence
  Synthetic
cuggaaucggacagcagcg

SEQ ID NO: 18278 - RNA, 21 nt, Artificial Sequence
  Synthetic
accuggaaucggacagcagcg

SEQ ID NO: 18279 - RNA, 23 nt, Artificial Sequence
  Synthetic
cgaccuggaaucggacagcagcg

SEQ ID NO: 18280 - RNA, 24 nt, Artificial Sequence
  Synthetic
acgaccuggaaucggacagcagcg

SEQ ID NO: 18281 - RNA, 21 nt, Artificial Sequence
  Synthetic
cgccgugggcgucgcaggggu

SEQ ID NO: 18282 - RNA, 22 nt, Artificial Sequence
  Synthetic
acgccgugggcgucgcaggggu

SEQ ID NO: 18283 - RNA, 18 nt, Artificial Sequence
  Synthetic
ucugggugcuggguacgc

SEQ ID NO: 18284 - RNA, 19 nt, Artificial Sequence
  Synthetic
gucugggugcuggguacgc

SEQ ID NO: 18285 - RNA, 18 nt, Artificial Sequence
  Synthetic
cacuguggggcgcugguu

SEQ ID NO: 18286 - RNA, 19 nt, Artificial Sequence
  Synthetic
acacuguggggcgcugguu

SEQ ID NO: 18287 - RNA, 20 nt, Artificial Sequence
  Synthetic
cacacuguggggcgcugguu

SEQ ID NO: 18288 - RNA, 18 nt, Artificial Sequence
  Synthetic
agagccgccgcgacgacc

SEQ ID NO: 18289 - RNA, 19 nt, Artificial Sequence
  Synthetic
gagagccgccgcgacgacc

SEQ ID NO: 18290 - RNA, 21 nt, Artificial Sequence
  Synthetic
cggagagccgccgcgacgacc

SEQ ID NO: 18291 - RNA, 22 nt, Artificial Sequence
  Synthetic
gcggagagccgccgcgacgacc

SEQ ID NO: 18292 - RNA, 23 nt, Artificial Sequence
  Synthetic
ggcggagagccgccgcgacgacc

SEQ ID NO: 18293 - RNA, 24 nt, Artificial Sequence
  Synthetic
cggcggagagccgccgcgacgacc

SEQ ID NO: 18294 - RNA, 18 nt, Artificial Sequence
  Synthetic
ggacgccgugggcgucgc

SEQ ID NO: 18295 - RNA, 19 nt, Artificial Sequence
  Synthetic
cggacgccgugggcgucgc

SEQ ID NO: 18296 - RNA, 18 nt, Artificial Sequence
  Synthetic
cgugggcgucgcaggggu

SEQ ID NO: 18297 - RNA, 19 nt, Artificial Sequence
  Synthetic
ccgugggcgucgcaggggu

SEQ ID NO: 18298 - RNA, 18 nt, Artificial Sequence
  Synthetic
caaugucagucgccauga

SEQ ID NO: 18299 - RNA, 19 nt, Artificial Sequence
  Synthetic
ucaaugucagucgccauga

SEQ ID NO: 18300 - RNA, 20 nt, Artificial Sequence
  Synthetic
aucaaugucagucgccauga

SEQ ID NO: 18301 - RNA, 21 nt, Artificial Sequence
  Synthetic
uaucaaugucagucgccauga

SEQ ID NO: 18302 - RNA, 22 nt, Artificial Sequence
  Synthetic
auaucaaugucagucgccauga

SEQ ID NO: 18303 - RNA, 23 nt, Artificial Sequence
  Synthetic
cauaucaaugucagucgccauga

SEQ ID NO: 18304 - RNA, 24 nt, Artificial Sequence
  Synthetic
gcauaucaaugucagucgccauga

SEQ ID NO: 18305 - RNA, 18 nt, Artificial Sequence
  Synthetic
uccauguccucguccgac

SEQ ID NO: 18306 - RNA, 19 nt, Artificial Sequence
  Synthetic
uuccauguccucguccgac

SEQ ID NO: 18307 - RNA, 20 nt, Artificial Sequence
  Synthetic
cuuccauguccucguccgac

SEQ ID NO: 18308 - RNA, 21 nt, Artificial Sequence
  Synthetic
ucuuccauguccucguccgac

SEQ ID NO: 18309 - RNA, 22 nt, Artificial Sequence
  Synthetic
gucuuccauguccucguccgac

SEQ ID NO: 18310 - RNA, 23 nt, Artificial Sequence
  Synthetic
ggucuuccauguccucguccgac

SEQ ID NO: 18311 - RNA, 24 nt, Artificial Sequence
  Synthetic
gggucuuccauguccucguccgac

SEQ ID NO: 18312 - RNA, 18 nt, Artificial Sequence
  Synthetic
acaaaccaucggcagccc

SEQ ID NO: 18313 - RNA, 19 nt, Artificial Sequence
  Synthetic
gacaaaccaucggcagccc

SEQ ID NO: 18314 - RNA, 21 nt, Artificial Sequence
  Synthetic
ccgacaaaccaucggcagccc

SEQ ID NO: 18315 - RNA, 22 nt, Artificial Sequence
  Synthetic
uccgacaaaccaucggcagccc

SEQ ID NO: 18316 - RNA, 23 nt, Artificial Sequence
  Synthetic
guccgacaaaccaucggcagccc

SEQ ID NO: 18317 - RNA, 24 nt, Artificial Sequence
  Synthetic
gguccgacaaaccaucggcagccc

SEQ ID NO: 18318 - RNA, 18 nt, Artificial Sequence
  Synthetic
gacaaaccaucggcagcc

SEQ ID NO: 18319 - RNA, 19 nt, Artificial Sequence
  Synthetic
cgacaaaccaucggcagcc

SEQ ID NO: 18320 - RNA, 20 nt, Artificial Sequence
  Synthetic
ccgacaaaccaucggcagcc

SEQ ID NO: 18321 - RNA, 21 nt, Artificial Sequence
  Synthetic
uccgacaaaccaucggcagcc

SEQ ID NO: 18322 - RNA, 22 nt, Artificial Sequence
  Synthetic
guccgacaaaccaucggcagcc

SEQ ID NO: 18323 - RNA, 23 nt, Artificial Sequence
  Synthetic
gguccgacaaaccaucggcagcc

SEQ ID NO: 18324 - RNA, 24 nt, Artificial Sequence
  Synthetic
ggguccgacaaaccaucggcagcc

SEQ ID NO: 18325 - RNA, 18 nt, Artificial Sequence
  Synthetic
acgcccacggcguccgcc

SEQ ID NO: 18326 - RNA, 19 nt, Artificial Sequence
  Synthetic
gacgcccacggcguccgcc

SEQ ID NO: 18327 - RNA, 21 nt, Artificial Sequence
  Synthetic
gcgacgcccacggcguccgcc

SEQ ID NO: 18328 - RNA, 22 nt, Artificial Sequence
  Synthetic
ugcgacgcccacggcguccgcc

SEQ ID NO: 18329 - RNA, 23 nt, Artificial Sequence
  Synthetic
cugcgacgcccacggcguccgcc

SEQ ID NO: 18330 - RNA, 24 nt, Artificial Sequence
  Synthetic
ccugcgacgcccacggcguccgcc

SEQ ID NO: 18331 - RNA, 18 nt, Artificial Sequence
  Synthetic
caagacggucgccgggcc

SEQ ID NO: 18332 - RNA, 19 nt, Artificial Sequence
  Synthetic
gcaagacggucgccgggcc

SEQ ID NO: 18333 - RNA, 20 nt, Artificial Sequence
  Synthetic
agcaagacggucgccgggcc

SEQ ID NO: 18334 - RNA, 21 nt, Artificial Sequence
  Synthetic
gagcaagacggucgccgggcc

SEQ ID NO: 18335 - RNA, 22 nt, Artificial Sequence
  Synthetic
ggagcaagacggucgccgggcc

SEQ ID NO: 18336 - RNA, 23 nt, Artificial Sequence
  Synthetic
gggagcaagacggucgccgggcc

SEQ ID NO: 18337 - RNA, 24 nt, Artificial Sequence
  Synthetic
ggggagcaagacggucgccgggcc

SEQ ID NO: 18338 - RNA, 18 nt, Artificial Sequence
  Synthetic
cuccgguccguccucucc

SEQ ID NO: 18339 - RNA, 19 nt, Artificial Sequence
  Synthetic
gcuccgguccguccucucc

SEQ ID NO: 18340 - RNA, 20 nt, Artificial Sequence
  Synthetic
ggcuccgguccguccucucc

SEQ ID NO: 18341 - RNA, 21 nt, Artificial Sequence
  Synthetic
cggcuccgguccguccucucc

SEQ ID NO: 18342 - RNA, 22 nt, Artificial Sequence
  Synthetic
ucggcuccgguccguccucucc

SEQ ID NO: 18343 - RNA, 23 nt, Artificial Sequence
  Synthetic
aucggcuccgguccguccucucc

SEQ ID NO: 18344 - RNA, 24 nt, Artificial Sequence
  Synthetic
uaucggcuccgguccguccucucc

SEQ ID NO: 18345 - RNA, 18 nt, Artificial Sequence
  Synthetic
cggcggcucuccgccggc

SEQ ID NO: 18346 - RNA, 19 nt, Artificial Sequence
  Synthetic
gcggcggcucuccgccggc

SEQ ID NO: 18347 - RNA, 20 nt, Artificial Sequence
  Synthetic
cgcggcggcucuccgccggc

SEQ ID NO: 18348 - RNA, 21 nt, Artificial Sequence
  Synthetic
ucgcggcggcucuccgccggc

SEQ ID NO: 18349 - RNA, 22 nt, Artificial Sequence
  Synthetic
gucgcggcggcucuccgccggc

SEQ ID NO: 18350 - RNA, 23 nt, Artificial Sequence
  Synthetic
cgucgcggcggcucuccgccggc

SEQ ID NO: 18351 - RNA, 24 nt, Artificial Sequence
  Synthetic
ucgucgcggcggcucuccgccggc

SEQ ID NO: 18352 - RNA, 18 nt, Artificial Sequence
  Synthetic
accuugcccccgugcugc

SEQ ID NO: 18353 - RNA, 19 nt, Artificial Sequence
  Synthetic
caccuugcccccgugcugc

SEQ ID NO: 18354 - RNA, 20 nt, Artificial Sequence
  Synthetic
ccaccuugcccccgugcugc

SEQ ID NO: 18355 - RNA, 21 nt, Artificial Sequence
  Synthetic
gccaccuugcccccgugcugc

SEQ ID NO: 18356 - RNA, 22 nt, Artificial Sequence
  Synthetic
ggccaccuugcccccgugcugc

SEQ ID NO: 18357 - RNA, 23 nt, Artificial Sequence
  Synthetic
gggccaccuugcccccgugcugc

SEQ ID NO: 18358 - RNA, 24 nt, Artificial Sequence
  Synthetic
cgggccaccuugcccccgugcugc

SEQ ID NO: 18359 - RNA, 18 nt, Artificial Sequence
  Synthetic
gcggcucuccgccggcuc

SEQ ID NO: 18360 - RNA, 19 nt, Artificial Sequence
  Synthetic
ggcggcucuccgccggcuc

SEQ ID NO: 18361 - RNA, 21 nt, Artificial Sequence
  Synthetic
gcggcggcucuccgccggcuc

SEQ ID NO: 18362 - RNA, 22 nt, Artificial Sequence
  Synthetic
cgcggcggcucuccgccggcuc

SEQ ID NO: 18363 - RNA, 23 nt, Artificial Sequence
  Synthetic
ucgcggcggcucuccgccggcuc

SEQ ID NO: 18364 - RNA, 24 nt, Artificial Sequence
  Synthetic
gucgcggcggcucuccgccggcuc

SEQ ID NO: 18365 - RNA, 18 nt, Artificial Sequence
  Synthetic
cuugcccccgugcugcuc

SEQ ID NO: 18366 - RNA, 19 nt, Artificial Sequence
  Synthetic
ccuugcccccgugcugcuc

SEQ ID NO: 18367 - RNA, 21 nt, Artificial Sequence
  Synthetic
caccuugcccccgugcugcuc

SEQ ID NO: 18368 - RNA, 22 nt, Artificial Sequence
  Synthetic
ccaccuugcccccgugcugcuc

SEQ ID NO: 18369 - RNA, 23 nt, Artificial Sequence
  Synthetic
gccaccuugcccccgugcugcuc

SEQ ID NO: 18370 - RNA, 24 nt, Artificial Sequence
  Synthetic
ggccaccuugcccccgugcugcuc

SEQ ID NO: 18371 - RNA, 18 nt, Artificial Sequence
  Synthetic
caggguugcgauugguuc

SEQ ID NO: 18372 - RNA, 19 nt, Artificial Sequence
  Synthetic
ccaggguugcgauugguuc

SEQ ID NO: 18373 - RNA, 21 nt, Artificial Sequence
  Synthetic
ccccaggguugcgauugguuc

SEQ ID NO: 18374 - RNA, 22 nt, Artificial Sequence
  Synthetic
cccccaggguugcgauugguuc

SEQ ID NO: 18375 - RNA, 23 nt, Artificial Sequence
  Synthetic
ucccccaggguugcgauugguuc

SEQ ID NO: 18376 - RNA, 24 nt, Artificial Sequence
  Synthetic
gucccccaggguugcgauugguuc

SEQ ID NO: 18377 - RNA, 18 nt, Artificial Sequence
  Synthetic
cggggucuucuggacgag

SEQ ID NO: 18378 - RNA, 19 nt, Artificial Sequence
  Synthetic
ccggggucuucuggacgag

SEQ ID NO: 18379 - RNA, 20 nt, Artificial Sequence
  Synthetic
gccggggucuucuggacgag

SEQ ID NO: 18380 - RNA, 21 nt, Artificial Sequence
  Synthetic
cgccggggucuucuggacgag

SEQ ID NO: 18381 - RNA, 22 nt, Artificial Sequence
  Synthetic
acgccggggucuucuggacgag

SEQ ID NO: 18382 - RNA, 23 nt, Artificial Sequence
  Synthetic
uacgccggggucuucuggacgag

SEQ ID NO: 18383 - RNA, 24 nt, Artificial Sequence
  Synthetic
guacgccggggucuucuggacgag

SEQ ID NO: 18384 - RNA, 18 nt, Artificial Sequence
  Synthetic
ggucgguggggguuggag

SEQ ID NO: 18385 - RNA, 19 nt, Artificial Sequence
  Synthetic
uggucgguggggguuggag

SEQ ID NO: 18386 - RNA, 20 nt, Artificial Sequence
  Synthetic
uuggucgguggggguuggag

SEQ ID NO: 18387 - RNA, 21 nt, Artificial Sequence
  Synthetic
uuuggucgguggggguuggag

SEQ ID NO: 18388 - RNA, 22 nt, Artificial Sequence
  Synthetic
cuuuggucgguggggguuggag

SEQ ID NO: 18389 - RNA, 23 nt, Artificial Sequence
  Synthetic
gcuuuggucgguggggguuggag

SEQ ID NO: 18390 - RNA, 24 nt, Artificial Sequence
  Synthetic
ggcuuuggucgguggggguuggag

SEQ ID NO: 18391 - RNA, 18 nt, Artificial Sequence
  Synthetic
ccauguccucguccgacg

SEQ ID NO: 18392 - RNA, 19 nt, Artificial Sequence
  Synthetic
uccauguccucguccgacg

SEQ ID NO: 18393 - RNA, 21 nt, Artificial Sequence
  Synthetic
cuuccauguccucguccgacg

SEQ ID NO: 18394 - RNA, 22 nt, Artificial Sequence
  Synthetic
ucuuccauguccucguccgacg

SEQ ID NO: 18395 - RNA, 23 nt, Artificial Sequence
  Synthetic
gucuuccauguccucguccgacg

SEQ ID NO: 18396 - RNA, 24 nt, Artificial Sequence
  Synthetic
ggucuuccauguccucguccgacg

SEQ ID NO: 18397 - RNA, 18 nt, Artificial Sequence
  Synthetic
gucugggugcuggguacg

SEQ ID NO: 18398 - RNA, 19 nt, Artificial Sequence
  Synthetic
cgucugggugcuggguacg

SEQ ID NO: 18399 - RNA, 20 nt, Artificial Sequence
  Synthetic
gcgucugggugcuggguacg

SEQ ID NO: 18400 - RNA, 21 nt, Artificial Sequence
  Synthetic
ggcgucugggugcuggguacg

SEQ ID NO: 18401 - RNA, 22 nt, Artificial Sequence
  Synthetic
aggcgucugggugcuggguacg

SEQ ID NO: 18402 - RNA, 23 nt, Artificial Sequence
  Synthetic
gaggcgucugggugcuggguacg

SEQ ID NO: 18403 - RNA, 24 nt, Artificial Sequence
  Synthetic
cgaggcgucugggugcuggguacg

SEQ ID NO: 18404 - RNA, 18 nt, Artificial Sequence
  Synthetic
gacgagacgggcggaccg

SEQ ID NO: 18405 - RNA, 19 nt, Artificial Sequence
  Synthetic
ggacgagacgggcggaccg

SEQ ID NO: 18406 - RNA, 20 nt, Artificial Sequence
  Synthetic
uggacgagacgggcggaccg

SEQ ID NO: 18407 - RNA, 21 nt, Artificial Sequence
  Synthetic
cuggacgagacgggcggaccg

SEQ ID NO: 18408 - RNA, 22 nt, Artificial Sequence
  Synthetic
ucuggacgagacgggcggaccg

SEQ ID NO: 18409 - RNA, 23 nt, Artificial Sequence
  Synthetic
uucuggacgagacgggcggaccg

SEQ ID NO: 18410 - RNA, 24 nt, Artificial Sequence
  Synthetic
cuucuggacgagacgggcggaccg

SEQ ID NO: 18411 - RNA, 18 nt, Artificial Sequence
  Synthetic
gguucugggggcacgccg

SEQ ID NO: 18412 - RNA, 19 nt, Artificial Sequence
  Synthetic
ugguucugggggcacgccg

SEQ ID NO: 18413 - RNA, 20 nt, Artificial Sequence
  Synthetic
uugguucugggggcacgccg

SEQ ID NO: 18414 - RNA, 21 nt, Artificial Sequence
  Synthetic
auugguucugggggcacgccg

SEQ ID NO: 18415 - RNA, 22 nt, Artificial Sequence
  Synthetic
gauugguucugggggcacgccg

SEQ ID NO: 18416 - RNA, 23 nt, Artificial Sequence
  Synthetic
cgauugguucugggggcacgccg

SEQ ID NO: 18417 - RNA, 24 nt, Artificial Sequence
  Synthetic
gcgauugguucugggggcacgccg

SEQ ID NO: 18418 - RNA, 18 nt, Artificial Sequence
  Synthetic
ccgggcugucggcugccg

SEQ ID NO: 18419 - RNA, 19 nt, Artificial Sequence
  Synthetic
accgggcugucggcugccg

SEQ ID NO: 18420 - RNA, 20 nt, Artificial Sequence
  Synthetic
gaccgggcugucggcugccg

SEQ ID NO: 18421 - RNA, 21 nt, Artificial Sequence
  Synthetic
ugaccgggcugucggcugccg

SEQ ID NO: 18422 - RNA, 22 nt, Artificial Sequence
  Synthetic
augaccgggcugucggcugccg

SEQ ID NO: 18423 - RNA, 23 nt, Artificial Sequence
  Synthetic
caugaccgggcugucggcugccg

SEQ ID NO: 18424 - RNA, 24 nt, Artificial Sequence
  Synthetic
ccaugaccgggcugucggcugccg

SEQ ID NO: 18425 - RNA, 18 nt, Artificial Sequence
  Synthetic
uggggcccugccgcuccg

SEQ ID NO: 18426 - RNA, 19 nt, Artificial Sequence
  Synthetic
uuggggcccugccgcuccg

SEQ ID NO: 18427 - RNA, 20 nt, Artificial Sequence
  Synthetic
guuggggcccugccgcuccg

SEQ ID NO: 18428 - RNA, 21 nt, Artificial Sequence
  Synthetic
cguuggggcccugccgcuccg

SEQ ID NO: 18429 - RNA, 22 nt, Artificial Sequence
  Synthetic
ucguuggggcccugccgcuccg

SEQ ID NO: 18430 - RNA, 23 nt, Artificial Sequence
  Synthetic
aucguuggggcccugccgcuccg

SEQ ID NO: 18431 - RNA, 24 nt, Artificial Sequence
  Synthetic
gaucguuggggcccugccgcuccg

SEQ ID NO: 18432 - RNA, 18 nt, Artificial Sequence
  Synthetic
uccgguccguccucuccg

SEQ ID NO: 18433 - RNA, 19 nt, Artificial Sequence
  Synthetic
cuccgguccguccucuccg

SEQ ID NO: 18434 - RNA, 21 nt, Artificial Sequence
  Synthetic
ggcuccgguccguccucuccg

SEQ ID NO: 18435 - RNA, 22 nt, Artificial Sequence
  Synthetic
cggcuccgguccguccucuccg

SEQ ID NO: 18436 - RNA, 23 nt, Artificial Sequence
  Synthetic
ucggcuccgguccguccucuccg

SEQ ID NO: 18437 - RNA, 24 nt, Artificial Sequence
  Synthetic
aucggcuccgguccguccucuccg

SEQ ID NO: 18438 - RNA, 18 nt, Artificial Sequence
  Synthetic
cuuccauguccucguccg

SEQ ID NO: 18439 - RNA, 19 nt, Artificial Sequence
  Synthetic
ucuuccauguccucguccg

SEQ ID NO: 18440 - RNA, 20 nt, Artificial Sequence
  Synthetic
gucuuccauguccucguccg

SEQ ID NO: 18441 - RNA, 21 nt, Artificial Sequence
  Synthetic
ggucuuccauguccucguccg

SEQ ID NO: 18442 - RNA, 22 nt, Artificial Sequence
  Synthetic
gggucuuccauguccucguccg

SEQ ID NO: 18443 - RNA, 23 nt, Artificial Sequence
  Synthetic
ggggucuuccauguccucguccg

SEQ ID NO: 18444 - RNA, 24 nt, Artificial Sequence
  Synthetic
gggggucuuccauguccucguccg

SEQ ID NO: 18445 - RNA, 18 nt, Artificial Sequence
  Synthetic
ggcgcugguugaggaucg

SEQ ID NO: 18446 - RNA, 19 nt, Artificial Sequence
  Synthetic
gggcgcugguugaggaucg

SEQ ID NO: 18447 - RNA, 20 nt, Artificial Sequence
  Synthetic
ggggcgcugguugaggaucg

SEQ ID NO: 18448 - RNA, 21 nt, Artificial Sequence
  Synthetic
uggggcgcugguugaggaucg

SEQ ID NO: 18449 - RNA, 22 nt, Artificial Sequence
  Synthetic
guggggcgcugguugaggaucg

SEQ ID NO: 18450 - RNA, 23 nt, Artificial Sequence
  Synthetic
uguggggcgcugguugaggaucg

SEQ ID NO: 18451 - RNA, 24 nt, Artificial Sequence
  Synthetic
cuguggggcgcugguugaggaucg

SEQ ID NO: 18452 - RNA, 18 nt, Artificial Sequence
  Synthetic
cggcucuccgccggcucg

SEQ ID NO: 18453 - RNA, 19 nt, Artificial Sequence
  Synthetic
gcggcucuccgccggcucg

SEQ ID NO: 18454 - RNA, 21 nt, Artificial Sequence
  Synthetic
cggcggcucuccgccggcucg

SEQ ID NO: 18455 - RNA, 22 nt, Artificial Sequence
  Synthetic
gcggcggcucuccgccggcucg

SEQ ID NO: 18456 - RNA, 23 nt, Artificial Sequence
  Synthetic
cgcggcggcucuccgccggcucg

SEQ ID NO: 18457 - RNA, 24 nt, Artificial Sequence
  Synthetic
ucgcggcggcucuccgccggcucg

SEQ ID NO: 18458 - RNA, 18 nt, Artificial Sequence
  Synthetic
uugcccccgugcugcucg

SEQ ID NO: 18459 - RNA, 19 nt, Artificial Sequence
  Synthetic
cuugcccccgugcugcucg

SEQ ID NO: 18460 - RNA, 21 nt, Artificial Sequence
  Synthetic
accuugcccccgugcugcucg

SEQ ID NO: 18461 - RNA, 22 nt, Artificial Sequence
  Synthetic
caccuugcccccgugcugcucg

SEQ ID NO: 18462 - RNA, 23 nt, Artificial Sequence
  Synthetic
ccaccuugcccccgugcugcucg

SEQ ID NO: 18463 - RNA, 24 nt, Artificial Sequence
  Synthetic
gccaccuugcccccgugcugcucg

SEQ ID NO: 18464 - RNA, 18 nt, Artificial Sequence
  Synthetic
gggggagcaagacggucg

SEQ ID NO: 18465 - RNA, 19 nt, Artificial Sequence
  Synthetic
cgggggagcaagacggucg

SEQ ID NO: 18466 - RNA, 20 nt, Artificial Sequence
  Synthetic
ucgggggagcaagacggucg

SEQ ID NO: 18467 - RNA, 21 nt, Artificial Sequence
  Synthetic
cucgggggagcaagacggucg

SEQ ID NO: 18468 - RNA, 22 nt, Artificial Sequence
  Synthetic
gcucgggggagcaagacggucg

SEQ ID NO: 18469 - RNA, 23 nt, Artificial Sequence
  Synthetic
ugcucgggggagcaagacggucg

SEQ ID NO: 18470 - RNA, 24 nt, Artificial Sequence
  Synthetic
cugcucgggggagcaagacggucg

SEQ ID NO: 18471 - RNA, 18 nt, Artificial Sequence
  Synthetic
caggcugggcuuuggucg

SEQ ID NO: 18472 - RNA, 19 nt, Artificial Sequence
  Synthetic
gcaggcugggcuuuggucg

SEQ ID NO: 18473 - RNA, 20 nt, Artificial Sequence
  Synthetic
ggcaggcugggcuuuggucg

SEQ ID NO: 18474 - RNA, 21 nt, Artificial Sequence
  Synthetic
gggcaggcugggcuuuggucg

SEQ ID NO: 18475 - RNA, 22 nt, Artificial Sequence
  Synthetic
cgggcaggcugggcuuuggucg

SEQ ID NO: 18476 - RNA, 23 nt, Artificial Sequence
  Synthetic
gcgggcaggcugggcuuuggucg

SEQ ID NO: 18477 - RNA, 24 nt, Artificial Sequence
  Synthetic
cgcgggcaggcugggcuuuggucg

SEQ ID NO: 18478 - RNA, 18 nt, Artificial Sequence
  Synthetic
ucguccagaucgcugucg

SEQ ID NO: 18479 - RNA, 19 nt, Artificial Sequence
  Synthetic
cucguccagaucgcugucg

SEQ ID NO: 18480 - RNA, 20 nt, Artificial Sequence
  Synthetic
ccucguccagaucgcugucg

SEQ ID NO: 18481 - RNA, 21 nt, Artificial Sequence
  Synthetic
uccucguccagaucgcugucg

SEQ ID NO: 18482 - RNA, 22 nt, Artificial Sequence
  Synthetic
guccucguccagaucgcugucg

SEQ ID NO: 18483 - RNA, 23 nt, Artificial Sequence
  Synthetic
gguccucguccagaucgcugucg

SEQ ID NO: 18484 - RNA, 24 nt, Artificial Sequence
  Synthetic
ggguccucguccagaucgcugucg

SEQ ID NO: 18485 - RNA, 18 nt, Artificial Sequence
  Synthetic
cugucggagagguccagg

SEQ ID NO: 18486 - RNA, 19 nt, Artificial Sequence
  Synthetic
gcugucggagagguccagg

SEQ ID NO: 18487 - RNA, 20 nt, Artificial Sequence
  Synthetic
cgcugucggagagguccagg

SEQ ID NO: 18488 - RNA, 21 nt, Artificial Sequence
  Synthetic
ucgcugucggagagguccagg

SEQ ID NO: 18489 - RNA, 22 nt, Artificial Sequence
  Synthetic
aucgcugucggagagguccagg

SEQ ID NO: 18490 - RNA, 23 nt, Artificial Sequence
  Synthetic
gaucgcugucggagagguccagg

SEQ ID NO: 18491 - RNA, 24 nt, Artificial Sequence
  Synthetic
agaucgcugucggagagguccagg

SEQ ID NO: 18492 - RNA, 18 nt, Artificial Sequence
  Synthetic
gcguccgccgcgggcagg

SEQ ID NO: 18493 - RNA, 19 nt, Artificial Sequence
  Synthetic
ggcguccgccgcgggcagg

SEQ ID NO: 18494 - RNA, 20 nt, Artificial Sequence
  Synthetic
cggcguccgccgcgggcagg

SEQ ID NO: 18495 - RNA, 21 nt, Artificial Sequence
  Synthetic
acggcguccgccgcgggcagg

SEQ ID NO: 18496 - RNA, 22 nt, Artificial Sequence
  Synthetic
cacggcguccgccgcgggcagg

SEQ ID NO: 18497 - RNA, 23 nt, Artificial Sequence
  Synthetic
ccacggcguccgccgcgggcagg

SEQ ID NO: 18498 - RNA, 24 nt, Artificial Sequence
  Synthetic
cccacggcguccgccgcgggcagg

SEQ ID NO: 18499 - RNA, 18 nt, Artificial Sequence
  Synthetic
gucuucuggacgagacgg

SEQ ID NO: 18500 - RNA, 19 nt, Artificial Sequence
  Synthetic
ggucuucuggacgagacgg

SEQ ID NO: 18501 - RNA, 20 nt, Artificial Sequence
  Synthetic
gggucuucuggacgagacgg

SEQ ID NO: 18502 - RNA, 21 nt, Artificial Sequence
  Synthetic
ggggucuucuggacgagacgg

SEQ ID NO: 18503 - RNA, 22 nt, Artificial Sequence
  Synthetic
cggggucuucuggacgagacgg

SEQ ID NO: 18504 - RNA, 23 nt, Artificial Sequence
  Synthetic
ccggggucuucuggacgagacgg

SEQ ID NO: 18505 - RNA, 24 nt, Artificial Sequence
  Synthetic
gccggggucuucuggacgagacgg

SEQ ID NO: 18506 - RNA, 18 nt, Artificial Sequence
  Synthetic
guucugggggcacgccgg

SEQ ID NO: 18507 - RNA, 19 nt, Artificial Sequence
  Synthetic
gguucugggggcacgccgg

SEQ ID NO: 18508 - RNA, 21 nt, Artificial Sequence
  Synthetic
uugguucugggggcacgccgg

SEQ ID NO: 18509 - RNA, 22 nt, Artificial Sequence
  Synthetic
auugguucugggggcacgccgg

SEQ ID NO: 18510 - RNA, 23 nt, Artificial Sequence
  Synthetic
gauugguucugggggcacgccgg

SEQ ID NO: 18511 - RNA, 24 nt, Artificial Sequence
  Synthetic
cgauugguucugggggcacgccgg

SEQ ID NO: 18512 - RNA, 18 nt, Artificial Sequence
  Synthetic
agacgggcggaccgccgg

SEQ ID NO: 18513 - RNA, 19 nt, Artificial Sequence
  Synthetic
gagacgggcggaccgccgg

SEQ ID NO: 18514 - RNA, 20 nt, Artificial Sequence
  Synthetic
cgagacgggcggaccgccgg

SEQ ID NO: 18515 - RNA, 21 nt, Artificial Sequence
  Synthetic
acgagacgggcggaccgccgg

SEQ ID NO: 18516 - RNA, 22 nt, Artificial Sequence
  Synthetic
gacgagacgggcggaccgccgg

SEQ ID NO: 18517 - RNA, 23 nt, Artificial Sequence
  Synthetic
ggacgagacgggcggaccgccgg

SEQ ID NO: 18518 - RNA, 24 nt, Artificial Sequence
  Synthetic
uggacgagacgggcggaccgccgg

SEQ ID NO: 18519 - RNA, 18 nt, Artificial Sequence
  Synthetic
ugcccccgugcugcucgg

SEQ ID NO: 18520 - RNA, 19 nt, Artificial Sequence
  Synthetic
uugcccccgugcugcucgg

SEQ ID NO: 18521 - RNA, 21 nt, Artificial Sequence
  Synthetic
ccuugcccccgugcugcucgg

SEQ ID NO: 18522 - RNA, 22 nt, Artificial Sequence
  Synthetic
accuugcccccgugcugcucgg

SEQ ID NO: 18523 - RNA, 23 nt, Artificial Sequence
  Synthetic
caccuugcccccgugcugcucgg

SEQ ID NO: 18524 - RNA, 24 nt, Artificial Sequence
  Synthetic
ccaccuugcccccgugcugcucgg

SEQ ID NO: 18525 - RNA, 18 nt, Artificial Sequence
  Synthetic
gcccugccgcuccgucgg

SEQ ID NO: 18526 - RNA, 19 nt, Artificial Sequence
  Synthetic
ggcccugccgcuccgucgg

SEQ ID NO: 18527 - RNA, 20 nt, Artificial Sequence
  Synthetic
gggcccugccgcuccgucgg

SEQ ID NO: 18528 - RNA, 21 nt, Artificial Sequence
  Synthetic
ggggcccugccgcuccgucgg

SEQ ID NO: 18529 - RNA, 22 nt, Artificial Sequence
  Synthetic
uggggcccugccgcuccgucgg

SEQ ID NO: 18530 - RNA, 23 nt, Artificial Sequence
  Synthetic
uuggggcccugccgcuccgucgg

SEQ ID NO: 18531 - RNA, 24 nt, Artificial Sequence
  Synthetic
guuggggcccugccgcuccgucgg

SEQ ID NO: 18532 - RNA, 18 nt, Artificial Sequence
  Synthetic
aggcugggcuuuggucgg

SEQ ID NO: 18533 - RNA, 19 nt, Artificial Sequence
  Synthetic
caggcugggcuuuggucgg

SEQ ID NO: 18534 - RNA, 21 nt, Artificial Sequence
  Synthetic
ggcaggcugggcuuuggucgg

SEQ ID NO: 18535 - RNA, 22 nt, Artificial Sequence
  Synthetic
gggcaggcugggcuuuggucgg

SEQ ID NO: 18536 - RNA, 23 nt, Artificial Sequence
  Synthetic
cgggcaggcugggcuuuggucgg

SEQ ID NO: 18537 - RNA, 24 nt, Artificial Sequence
  Synthetic
gcgggcaggcugggcuuuggucgg

SEQ ID NO: 18538 - RNA, 18 nt, Artificial Sequence
  Synthetic
ggcuuuggucgguggggg

SEQ ID NO: 18539 - RNA, 19 nt, Artificial Sequence
  Synthetic
gggcuuuggucgguggggg

SEQ ID NO: 18540 - RNA, 20 nt, Artificial Sequence
  Synthetic
ugggcuuuggucgguggggg

SEQ ID NO: 18541 - RNA, 21 nt, Artificial Sequence
  Synthetic
cugggcuuuggucgguggggg

SEQ ID NO: 18542 - RNA, 22 nt, Artificial Sequence
  Synthetic
gcugggcuuuggucgguggggg

SEQ ID NO: 18543 - RNA, 23 nt, Artificial Sequence
  Synthetic
ggcugggcuuuggucgguggggg

SEQ ID NO: 18544 - RNA, 24 nt, Artificial Sequence
  Synthetic
aggcugggcuuuggucgguggggg

SEQ ID NO: 18545 - RNA, 18 nt, Artificial Sequence
  Synthetic
cacacuguggggcgcugg

SEQ ID NO: 18546 - RNA, 19 nt, Artificial Sequence
  Synthetic
acacacuguggggcgcugg

SEQ ID NO: 18547 - RNA, 20 nt, Artificial Sequence
  Synthetic
cacacacuguggggcgcugg

SEQ ID NO: 18548 - RNA, 21 nt, Artificial Sequence
  Synthetic
ccacacacuguggggcgcugg

SEQ ID NO: 18549 - RNA, 22 nt, Artificial Sequence
  Synthetic
accacacacuguggggcgcugg

SEQ ID NO: 18550 - RNA, 23 nt, Artificial Sequence
  Synthetic
gaccacacacuguggggcgcugg

SEQ ID NO: 18551 - RNA, 24 nt, Artificial Sequence
  Synthetic
cgaccacacacuguggggcgcugg

SEQ ID NO: 18552 - RNA, 18 nt, Artificial Sequence
  Synthetic
uacgccggggucuucugg

SEQ ID NO: 18553 - RNA, 19 nt, Artificial Sequence
  Synthetic
guacgccggggucuucugg

SEQ ID NO: 18554 - RNA, 20 nt, Artificial Sequence
  Synthetic
gguacgccggggucuucugg

SEQ ID NO: 18555 - RNA, 21 nt, Artificial Sequence
  Synthetic
ggguacgccggggucuucugg

SEQ ID NO: 18556 - RNA, 22 nt, Artificial Sequence
  Synthetic
uggguacgccggggucuucugg

SEQ ID NO: 18557 - RNA, 23 nt, Artificial Sequence
  Synthetic
cuggguacgccggggucuucugg

SEQ ID NO: 18558 - RNA, 24 nt, Artificial Sequence
  Synthetic
gcuggguacgccggggucuucugg

SEQ ID NO: 18559 - RNA, 18 nt, Artificial Sequence
  Synthetic
aggcgcgaccacacacug

SEQ ID NO: 18560 - RNA, 19 nt, Artificial Sequence
  Synthetic
gaggcgcgaccacacacug

SEQ ID NO: 18561 - RNA, 21 nt, Artificial Sequence
  Synthetic
ccgaggcgcgaccacacacug

SEQ ID NO: 18562 - RNA, 22 nt, Artificial Sequence
  Synthetic
cccgaggcgcgaccacacacug

SEQ ID NO: 18563 - RNA, 23 nt, Artificial Sequence
  Synthetic
ccccgaggcgcgaccacacacug

SEQ ID NO: 18564 - RNA, 24 nt, Artificial Sequence
  Synthetic
gccccgaggcgcgaccacacacug

SEQ ID NO: 18565 - RNA, 18 nt, Artificial Sequence
  Synthetic
uccucguccagaucgcug

SEQ ID NO: 18566 - RNA, 19 nt, Artificial Sequence
  Synthetic
guccucguccagaucgcug

SEQ ID NO: 18567 - RNA, 20 nt, Artificial Sequence
  Synthetic
gguccucguccagaucgcug

SEQ ID NO: 18568 - RNA, 21 nt, Artificial Sequence
  Synthetic
ggguccucguccagaucgcug

SEQ ID NO: 18569 - RNA, 22 nt, Artificial Sequence
  Synthetic
gggguccucguccagaucgcug

SEQ ID NO: 18570 - RNA, 23 nt, Artificial Sequence
  Synthetic
ggggguccucguccagaucgcug

SEQ ID NO: 18571 - RNA, 24 nt, Artificial Sequence
  Synthetic
gggggguccucguccagaucgcug

SEQ ID NO: 18572 - RNA, 18 nt, Artificial Sequence
  Synthetic
gaggcgcgaccacacacu

SEQ ID NO: 18573 - RNA, 19 nt, Artificial Sequence
  Synthetic
cgaggcgcgaccacacacu

SEQ ID NO: 18574 - RNA, 20 nt, Artificial Sequence
  Synthetic
ccgaggcgcgaccacacacu

SEQ ID NO: 18575 - RNA, 21 nt, Artificial Sequence
  Synthetic
cccgaggcgcgaccacacacu

SEQ ID NO: 18576 - RNA, 22 nt, Artificial Sequence
  Synthetic
ccccgaggcgcgaccacacacu

SEQ ID NO: 18577 - RNA, 23 nt, Artificial Sequence
  Synthetic
gccccgaggcgcgaccacacacu

SEQ ID NO: 18578 - RNA, 24 nt, Artificial Sequence
  Synthetic
ggccccgaggcgcgaccacacacu

SEQ ID NO: 18579 - RNA, 18 nt, Artificial Sequence
  Synthetic
ggcggcucuccgccggcu

SEQ ID NO: 18580 - RNA, 19 nt, Artificial Sequence
  Synthetic
cggcggcucuccgccggcu

SEQ ID NO: 18581 - RNA, 21 nt, Artificial Sequence
  Synthetic
cgcggcggcucuccgccggcu

SEQ ID NO: 18582 - RNA, 22 nt, Artificial Sequence
  Synthetic
ucgcggcggcucuccgccggcu

SEQ ID NO: 18583 - RNA, 23 nt, Artificial Sequence
  Synthetic
gucgcggcggcucuccgccggcu

SEQ ID NO: 18584 - RNA, 24 nt, Artificial Sequence
  Synthetic
cgucgcggcggcucuccgccggcu

SEQ ID NO: 18585 - RNA, 18 nt, Artificial Sequence
  Synthetic
ccuugcccccgugcugcu

SEQ ID NO: 18586 - RNA, 19 nt, Artificial Sequence
  Synthetic
accuugcccccgugcugcu

SEQ ID NO: 18587 - RNA, 21 nt, Artificial Sequence
  Synthetic
ccaccuugcccccgugcugcu

SEQ ID NO: 18588 - RNA, 22 nt, Artificial Sequence
  Synthetic
gccaccuugcccccgugcugcu

SEQ ID NO: 18589 - RNA, 23 nt, Artificial Sequence
  Synthetic
ggccaccuugcccccgugcugcu

SEQ ID NO: 18590 - RNA, 24 nt, Artificial Sequence
  Synthetic
gggccaccuugcccccgugcugcu

SEQ ID NO: 18591 - RNA, 18 nt, Artificial Sequence
  Synthetic
aggguugcgauugguucu

SEQ ID NO: 18592 - RNA, 19 nt, Artificial Sequence
  Synthetic
caggguugcgauugguucu

SEQ ID NO: 18593 - RNA, 21 nt, Artificial Sequence
  Synthetic
cccaggguugcgauugguucu

SEQ ID NO: 18594 - RNA, 22 nt, Artificial Sequence
  Synthetic
ccccaggguugcgauugguucu

SEQ ID NO: 18595 - RNA, 23 nt, Artificial Sequence
  Synthetic
cccccaggguugcgauugguucu

SEQ ID NO: 18596 - RNA, 24 nt, Artificial Sequence
  Synthetic
ucccccaggguugcgauugguucu

SEQ ID NO: 18597 - RNA, 18 nt, Artificial Sequence
  Synthetic
cgggcugucggcugccgu

SEQ ID NO: 18598 - RNA, 19 nt, Artificial Sequence
  Synthetic
ccgggcugucggcugccgu

SEQ ID NO: 18599 - RNA, 21 nt, Artificial Sequence
  Synthetic
gaccgggcugucggcugccgu

SEQ ID NO: 18600 - RNA, 22 nt, Artificial Sequence
  Synthetic
ugaccgggcugucggcugccgu

SEQ ID NO: 18601 - RNA, 23 nt, Artificial Sequence
  Synthetic
augaccgggcugucggcugccgu

SEQ ID NO: 18602 - RNA, 24 nt, Artificial Sequence
  Synthetic
caugaccgggcugucggcugccgu

SEQ ID NO: 18603 - RNA, 18 nt, Artificial Sequence
  Synthetic
gcgcugguugaggaucgu

SEQ ID NO: 18604 - RNA, 19 nt, Artificial Sequence
  Synthetic
ggcgcugguugaggaucgu

SEQ ID NO: 18605 - RNA, 21 nt, Artificial Sequence
  Synthetic
ggggcgcugguugaggaucgu

SEQ ID NO: 18606 - RNA, 22 nt, Artificial Sequence
  Synthetic
uggggcgcugguugaggaucgu

SEQ ID NO: 18607 - RNA, 23 nt, Artificial Sequence
  Synthetic
guggggcgcugguugaggaucgu

SEQ ID NO: 18608 - RNA, 24 nt, Artificial Sequence
  Synthetic
uguggggcgcugguugaggaucgu

SEQ ID NO: 18609 - RNA, 18 nt, Artificial Sequence
  Synthetic
gcuuuggucggugggggu

SEQ ID NO: 18610 - RNA, 19 nt, Artificial Sequence
  Synthetic
ggcuuuggucggugggggu

SEQ ID NO: 18611 - RNA, 21 nt, Artificial Sequence
  Synthetic
ugggcuuuggucggugggggu

SEQ ID NO: 18612 - RNA, 22 nt, Artificial Sequence
  Synthetic
cugggcuuuggucggugggggu

SEQ ID NO: 18613 - RNA, 23 nt, Artificial Sequence
  Synthetic
gcugggcuuuggucggugggggu

SEQ ID NO: 18614 - RNA, 24 nt, Artificial Sequence
  Synthetic
ggcugggcuuuggucggugggggu

SEQ ID NO: 18615 - RNA, 18 nt, Artificial Sequence
  Synthetic
ccucguccagaucgcugu

SEQ ID NO: 18616 - RNA, 19 nt, Artificial Sequence
  Synthetic
uccucguccagaucgcugu

SEQ ID NO: 18617 - RNA, 21 nt, Artificial Sequence
  Synthetic
gguccucguccagaucgcugu

SEQ ID NO: 18618 - RNA, 22 nt, Artificial Sequence
  Synthetic
ggguccucguccagaucgcugu

SEQ ID NO: 18619 - RNA, 23 nt, Artificial Sequence
  Synthetic
gggguccucguccagaucgcugu

SEQ ID NO: 18620 - RNA, 24 nt, Artificial Sequence
  Synthetic
ggggguccucguccagaucgcugu

SEQ ID NO: 18621 - RNA, 18 nt, Artificial Sequence
  Synthetic
uggguacgccggggucuu

SEQ ID NO: 18622 - RNA, 19 nt, Artificial Sequence
  Synthetic
cuggguacgccggggucuu

SEQ ID NO: 18623 - RNA, 20 nt, Artificial Sequence
  Synthetic
gcuggguacgccggggucuu

SEQ ID NO: 18624 - RNA, 21 nt, Artificial Sequence
  Synthetic
ugcuggguacgccggggucuu

SEQ ID NO: 18625 - RNA, 22 nt, Artificial Sequence
  Synthetic
gugcuggguacgccggggucuu

SEQ ID NO: 18626 - RNA, 23 nt, Artificial Sequence
  Synthetic
ggugcuggguacgccggggucuu

SEQ ID NO: 18627 - RNA, 24 nt, Artificial Sequence
  Synthetic
gggugcuggguacgccggggucuu

SEQ ID NO: 18628 - RNA, 18 nt, Artificial Sequence
  Synthetic
ccaggguugcgauugguu

SEQ ID NO: 18629 - RNA, 19 nt, Artificial Sequence
  Synthetic
cccaggguugcgauugguu

SEQ ID NO: 18630 - RNA, 20 nt, Artificial Sequence
  Synthetic
ccccaggguugcgauugguu

SEQ ID NO: 18631 - RNA, 21 nt, Artificial Sequence
  Synthetic
cccccaggguugcgauugguu

SEQ ID NO: 18632 - RNA, 22 nt, Artificial Sequence
  Synthetic
ucccccaggguugcgauugguu

SEQ ID NO: 18633 - RNA, 23 nt, Artificial Sequence
  Synthetic
gucccccaggguugcgauugguu

SEQ ID NO: 18634 - RNA, 24 nt, Artificial Sequence
  Synthetic
ggucccccaggguugcgauugguu

SEQ ID NO: 18635 - RNA, 18 nt, Artificial Sequence
  Synthetic
cgccgcgacgaccuggaa

SEQ ID NO: 18636 - RNA, 19 nt, Artificial Sequence
  Synthetic
ccgccgcgacgaccuggaa

SEQ ID NO: 18637 - RNA, 21 nt, Artificial Sequence
  Synthetic
agccgccgcgacgaccuggaa

SEQ ID NO: 18638 - RNA, 22 nt, Artificial Sequence
  Synthetic
gagccgccgcgacgaccuggaa

SEQ ID NO: 18639 - RNA, 23 nt, Artificial Sequence
  Synthetic
agagccgccgcgacgaccuggaa

SEQ ID NO: 18640 - RNA, 24 nt, Artificial Sequence
  Synthetic
gagagccgccgcgacgaccuggaa

SEQ ID NO: 18641 - RNA, 18 nt, Artificial Sequence
  Synthetic
ccucgucggacgaggaca

SEQ ID NO: 18642 - RNA, 19 nt, Artificial Sequence
  Synthetic
uccucgucggacgaggaca

SEQ ID NO: 18643 - RNA, 21 nt, Artificial Sequence
  Synthetic
guuccucgucggacgaggaca

SEQ ID NO: 18644 - RNA, 22 nt, Artificial Sequence
  Synthetic
uguuccucgucggacgaggaca

SEQ ID NO: 18645 - RNA, 23 nt, Artificial Sequence
  Synthetic
guguuccucgucggacgaggaca

SEQ ID NO: 18646 - RNA, 24 nt, Artificial Sequence
  Synthetic
aguguuccucgucggacgaggaca

SEQ ID NO: 18647 - RNA, 18 nt, Artificial Sequence
  Synthetic
ggacauggaagaccccca

SEQ ID NO: 18648 - RNA, 19 nt, Artificial Sequence
  Synthetic
aggacauggaagaccccca

SEQ ID NO: 18649 - RNA, 21 nt, Artificial Sequence
  Synthetic
cgaggacauggaagaccccca

SEQ ID NO: 18650 - RNA, 22 nt, Artificial Sequence
  Synthetic
acgaggacauggaagaccccca

SEQ ID NO: 18651 - RNA, 23 nt, Artificial Sequence
  Synthetic
gacgaggacauggaagaccccca

SEQ ID NO: 18652 - RNA, 24 nt, Artificial Sequence
  Synthetic
ggacgaggacauggaagaccccca

SEQ ID NO: 18653 - RNA, 18 nt, Artificial Sequence
  Synthetic
accuggaaucggacagca

SEQ ID NO: 18654 - RNA, 19 nt, Artificial Sequence
  Synthetic
gaccuggaaucggacagca

SEQ ID NO: 18655 - RNA, 21 nt, Artificial Sequence
  Synthetic
acgaccuggaaucggacagca

SEQ ID NO: 18656 - RNA, 22 nt, Artificial Sequence
  Synthetic
gacgaccuggaaucggacagca

SEQ ID NO: 18657 - RNA, 23 nt, Artificial Sequence
  Synthetic
cgacgaccuggaaucggacagca

SEQ ID NO: 18658 - RNA, 24 nt, Artificial Sequence
  Synthetic
gcgacgaccuggaaucggacagca

SEQ ID NO: 18659 - RNA, 18 nt, Artificial Sequence
  Synthetic
uugcucccccgagcagca

SEQ ID NO: 18660 - RNA, 19 nt, Artificial Sequence
  Synthetic
cuugcucccccgagcagca

SEQ ID NO: 18661 - RNA, 21 nt, Artificial Sequence
  Synthetic
gucuugcucccccgagcagca

SEQ ID NO: 18662 - RNA, 22 nt, Artificial Sequence
  Synthetic
cgucuugcucccccgagcagca

SEQ ID NO: 18663 - RNA, 23 nt, Artificial Sequence
  Synthetic
ccgucuugcucccccgagcagca

SEQ ID NO: 18664 - RNA, 24 nt, Artificial Sequence
  Synthetic
accgucuugcucccccgagcagca

SEQ ID NO: 18665 - RNA, 18 nt, Artificial Sequence
  Synthetic
cccagacgccucguccga

SEQ ID NO: 18666 - RNA, 19 nt, Artificial Sequence
  Synthetic
acccagacgccucguccga

SEQ ID NO: 18667 - RNA, 21 nt, Artificial Sequence
  Synthetic
gcacccagacgccucguccga

SEQ ID NO: 18668 - RNA, 22 nt, Artificial Sequence
  Synthetic
agcacccagacgccucguccga

SEQ ID NO: 18669 - RNA, 23 nt, Artificial Sequence
  Synthetic
cagcacccagacgccucguccga

SEQ ID NO: 18670 - RNA, 24 nt, Artificial Sequence
  Synthetic
ccagcacccagacgccucguccga

SEQ ID NO: 18671 - RNA, 18 nt, Artificial Sequence
  Synthetic
auggaagacccccacgga

SEQ ID NO: 18672 - RNA, 19 nt, Artificial Sequence
  Synthetic
cauggaagacccccacgga

SEQ ID NO: 18673 - RNA, 21 nt, Artificial Sequence
  Synthetic
gacauggaagacccccacgga

SEQ ID NO: 18674 - RNA, 22 nt, Artificial Sequence
  Synthetic
ggacauggaagacccccacgga

SEQ ID NO: 18675 - RNA, 23 nt, Artificial Sequence
  Synthetic
aggacauggaagacccccacgga

SEQ ID NO: 18676 - RNA, 24 nt, Artificial Sequence
  Synthetic
gaggacauggaagacccccacgga

SEQ ID NO: 18677 - RNA, 18 nt, Artificial Sequence
  Synthetic
ccccacggagaggacgga

SEQ ID NO: 18678 - RNA, 19 nt, Artificial Sequence
  Synthetic
cccccacggagaggacgga

SEQ ID NO: 18679 - RNA, 21 nt, Artificial Sequence
  Synthetic
gacccccacggagaggacgga

SEQ ID NO: 18680 - RNA, 22 nt, Artificial Sequence
  Synthetic
agacccccacggagaggacgga

SEQ ID NO: 18681 - RNA, 23 nt, Artificial Sequence
  Synthetic
aagacccccacggagaggacgga

SEQ ID NO: 18682 - RNA, 24 nt, Artificial Sequence
  Synthetic
gaagacccccacggagaggacgga

SEQ ID NO: 18683 - RNA, 18 nt, Artificial Sequence
  Synthetic
ugcucccccgagcagcac

SEQ ID NO: 18684 - RNA, 19 nt, Artificial Sequence
  Synthetic
uugcucccccgagcagcac

SEQ ID NO: 18685 - RNA, 21 nt, Artificial Sequence
  Synthetic
ucuugcucccccgagcagcac

SEQ ID NO: 18686 - RNA, 22 nt, Artificial Sequence
  Synthetic
gucuugcucccccgagcagcac

SEQ ID NO: 18687 - RNA, 23 nt, Artificial Sequence
  Synthetic
cgucuugcucccccgagcagcac

SEQ ID NO: 18688 - RNA, 24 nt, Artificial Sequence
  Synthetic
ccgucuugcucccccgagcagcac

SEQ ID NO: 18689 - RNA, 18 nt, Artificial Sequence
  Synthetic
gagagccgccgcgacgac

SEQ ID NO: 18690 - RNA, 19 nt, Artificial Sequence
  Synthetic
ggagagccgccgcgacgac

SEQ ID NO: 18691 - RNA, 21 nt, Artificial Sequence
  Synthetic
gcggagagccgccgcgacgac

SEQ ID NO: 18692 - RNA, 22 nt, Artificial Sequence
  Synthetic
ggcggagagccgccgcgacgac

SEQ ID NO: 18693 - RNA, 23 nt, Artificial Sequence
  Synthetic
cggcggagagccgccgcgacgac

SEQ ID NO: 18694 - RNA, 24 nt, Artificial Sequence
  Synthetic
ccggcggagagccgccgcgacgac

SEQ ID NO: 18695 - RNA, 18 nt, Artificial Sequence
  Synthetic
uccucgucggacgaggac

SEQ ID NO: 18696 - RNA, 19 nt, Artificial Sequence
  Synthetic
uuccucgucggacgaggac

SEQ ID NO: 18697 - RNA, 21 nt, Artificial Sequence
  Synthetic
uguuccucgucggacgaggac

SEQ ID NO: 18698 - RNA, 22 nt, Artificial Sequence
  Synthetic
guguuccucgucggacgaggac

SEQ ID NO: 18699 - RNA, 23 nt, Artificial Sequence
  Synthetic
aguguuccucgucggacgaggac

SEQ ID NO: 18700 - RNA, 24 nt, Artificial Sequence
  Synthetic
gaguguuccucgucggacgaggac

SEQ ID NO: 18701 - RNA, 18 nt, Artificial Sequence
  Synthetic
cccacggagaggacggac

SEQ ID NO: 18702 - RNA, 19 nt, Artificial Sequence
  Synthetic
ccccacggagaggacggac

SEQ ID NO: 18703 - RNA, 21 nt, Artificial Sequence
  Synthetic
acccccacggagaggacggac

SEQ ID NO: 18704 - RNA, 22 nt, Artificial Sequence
  Synthetic
gacccccacggagaggacggac

SEQ ID NO: 18705 - RNA, 23 nt, Artificial Sequence
  Synthetic
agacccccacggagaggacggac

SEQ ID NO: 18706 - RNA, 24 nt, Artificial Sequence
  Synthetic
aagacccccacggagaggacggac

SEQ ID NO: 18707 - RNA, 18 nt, Artificial Sequence
  Synthetic
gaguguuccucgucggac

SEQ ID NO: 18708 - RNA, 19 nt, Artificial Sequence
  Synthetic
ggaguguuccucgucggac

SEQ ID NO: 18709 - RNA, 21 nt, Artificial Sequence
  Synthetic
ggggaguguuccucgucggac

SEQ ID NO: 18710 - RNA, 22 nt, Artificial Sequence
  Synthetic
cggggaguguuccucgucggac

SEQ ID NO: 18711 - RNA, 23 nt, Artificial Sequence
  Synthetic
gcggggaguguuccucgucggac

SEQ ID NO: 18712 - RNA, 24 nt, Artificial Sequence
  Synthetic
agcggggaguguuccucgucggac

SEQ ID NO: 18713 - RNA, 18 nt, Artificial Sequence
  Synthetic
uccgacagcgaucuggac

SEQ ID NO: 18714 - RNA, 19 nt, Artificial Sequence
  Synthetic
cuccgacagcgaucuggac

SEQ ID NO: 18715 - RNA, 21 nt, Artificial Sequence
  Synthetic
cucuccgacagcgaucuggac

SEQ ID NO: 18716 - RNA, 22 nt, Artificial Sequence
  Synthetic
ccucuccgacagcgaucuggac

SEQ ID NO: 18717 - RNA, 23 nt, Artificial Sequence
  Synthetic
accucuccgacagcgaucuggac

SEQ ID NO: 18718 - RNA, 24 nt, Artificial Sequence
  Synthetic
gaccucuccgacagcgaucuggac

SEQ ID NO: 18719 - RNA, 18 nt, Artificial Sequence
  Synthetic
ccagaaccaaucgcaacc

SEQ ID NO: 18720 - RNA, 19 nt, Artificial Sequence
  Synthetic
cccagaaccaaucgcaacc

SEQ ID NO: 18721 - RNA, 20 nt, Artificial Sequence
  Synthetic
ccccagaaccaaucgcaacc

SEQ ID NO: 18722 - RNA, 21 nt, Artificial Sequence
  Synthetic
cccccagaaccaaucgcaacc

SEQ ID NO: 18723 - RNA, 22 nt, Artificial Sequence
  Synthetic
gcccccagaaccaaucgcaacc

SEQ ID NO: 18724 - RNA, 23 nt, Artificial Sequence
  Synthetic
ugcccccagaaccaaucgcaacc

SEQ ID NO: 18725 - RNA, 24 nt, Artificial Sequence
  Synthetic
gugcccccagaaccaaucgcaacc

SEQ ID NO: 18726 - RNA, 18 nt, Artificial Sequence
  Synthetic
cagaaccaaucgcaaccc

SEQ ID NO: 18727 - RNA, 19 nt, Artificial Sequence
  Synthetic
ccagaaccaaucgcaaccc

SEQ ID NO: 18728 - RNA, 21 nt, Artificial Sequence
  Synthetic
ccccagaaccaaucgcaaccc

SEQ ID NO: 18729 - RNA, 22 nt, Artificial Sequence
  Synthetic
cccccagaaccaaucgcaaccc

SEQ ID NO: 18730 - RNA, 23 nt, Artificial Sequence
  Synthetic
gcccccagaaccaaucgcaaccc

SEQ ID NO: 18731 - RNA, 24 nt, Artificial Sequence
  Synthetic
ugcccccagaaccaaucgcaaccc

SEQ ID NO: 18732 - RNA, 18 nt, Artificial Sequence
  Synthetic
aggacauggaagaccccc

SEQ ID NO: 18733 - RNA, 19 nt, Artificial Sequence
  Synthetic
gaggacauggaagaccccc

SEQ ID NO: 18734 - RNA, 21 nt, Artificial Sequence
  Synthetic
acgaggacauggaagaccccc

SEQ ID NO: 18735 - RNA, 22 nt, Artificial Sequence
  Synthetic
gacgaggacauggaagaccccc

SEQ ID NO: 18736 - RNA, 23 nt, Artificial Sequence
  Synthetic
ggacgaggacauggaagaccccc

SEQ ID NO: 18737 - RNA, 24 nt, Artificial Sequence
  Synthetic
cggacgaggacauggaagaccccc

SEQ ID NO: 18738 - RNA, 18 nt, Artificial Sequence
  Synthetic
aucuggacgaggaccccc

SEQ ID NO: 18739 - RNA, 19 nt, Artificial Sequence
  Synthetic
gaucuggacgaggaccccc

SEQ ID NO: 18740 - RNA, 21 nt, Artificial Sequence
  Synthetic
gcgaucuggacgaggaccccc

SEQ ID NO: 18741 - RNA, 22 nt, Artificial Sequence
  Synthetic
agcgaucuggacgaggaccccc

SEQ ID NO: 18742 - RNA, 23 nt, Artificial Sequence
  Synthetic
cagcgaucuggacgaggaccccc

SEQ ID NO: 18743 - RNA, 24 nt, Artificial Sequence
  Synthetic
acagcgaucuggacgaggaccccc

SEQ ID NO: 18744 - RNA, 18 nt, Artificial Sequence
  Synthetic
cccccgccggcgugcccc

SEQ ID NO: 18745 - RNA, 19 nt, Artificial Sequence
  Synthetic
acccccgccggcgugcccc

SEQ ID NO: 18746 - RNA, 20 nt, Artificial Sequence
  Synthetic
gacccccgccggcgugcccc

SEQ ID NO: 18747 - RNA, 21 nt, Artificial Sequence
  Synthetic
ggacccccgccggcgugcccc

SEQ ID NO: 18748 - RNA, 22 nt, Artificial Sequence
  Synthetic
cggacccccgccggcgugcccc

SEQ ID NO: 18749 - RNA, 23 nt, Artificial Sequence
  Synthetic
ucggacccccgccggcgugcccc

SEQ ID NO: 18750 - RNA, 24 nt, Artificial Sequence
  Synthetic
gucggacccccgccggcgugcccc

SEQ ID NO: 18751 - RNA, 18 nt, Artificial Sequence
  Synthetic
ggcgaccgucuugcuccc

SEQ ID NO: 18752 - RNA, 19 nt, Artificial Sequence
  Synthetic
cggcgaccgucuugcuccc

SEQ ID NO: 18753 - RNA, 21 nt, Artificial Sequence
  Synthetic
cccggcgaccgucuugcuccc

SEQ ID NO: 18754 - RNA, 22 nt, Artificial Sequence
  Synthetic
gcccggcgaccgucuugcuccc

SEQ ID NO: 18755 - RNA, 23 nt, Artificial Sequence
  Synthetic
ggcccggcgaccgucuugcuccc

SEQ ID NO: 18756 - RNA, 24 nt, Artificial Sequence
  Synthetic
gggcccggcgaccgucuugcuccc

SEQ ID NO: 18757 - RNA, 18 nt, Artificial Sequence
  Synthetic
cugcccgcggcggacgcc

SEQ ID NO: 18758 - RNA, 19 nt, Artificial Sequence
  Synthetic
ccugcccgcggcggacgcc

SEQ ID NO: 18759 - RNA, 21 nt, Artificial Sequence
  Synthetic
agccugcccgcggcggacgcc

SEQ ID NO: 18760 - RNA, 22 nt, Artificial Sequence
  Synthetic
cagccugcccgcggcggacgcc

SEQ ID NO: 18761 - RNA, 23 nt, Artificial Sequence
  Synthetic
ccagccugcccgcggcggacgcc

SEQ ID NO: 18762 - RNA, 24 nt, Artificial Sequence
  Synthetic
cccagccugcccgcggcggacgcc

SEQ ID NO: 18763 - RNA, 18 nt, Artificial Sequence
  Synthetic
acaguguguggucgcgcc

SEQ ID NO: 18764 - RNA, 19 nt, Artificial Sequence
  Synthetic
cacaguguguggucgcgcc

SEQ ID NO: 18765 - RNA, 21 nt, Artificial Sequence
  Synthetic
cccacaguguguggucgcgcc

SEQ ID NO: 18766 - RNA, 22 nt, Artificial Sequence
  Synthetic
ccccacaguguguggucgcgcc

SEQ ID NO: 18767 - RNA, 23 nt, Artificial Sequence
  Synthetic
gccccacaguguguggucgcgcc

SEQ ID NO: 18768 - RNA, 24 nt, Artificial Sequence
  Synthetic
cgccccacaguguguggucgcgcc

SEQ ID NO: 18769 - RNA, 18 nt, Artificial Sequence
  Synthetic
ucggggucgcgguggucc

SEQ ID NO: 18770 - RNA, 19 nt, Artificial Sequence
  Synthetic
gucggggucgcgguggucc

SEQ ID NO: 18771 - RNA, 21 nt, Artificial Sequence
  Synthetic
gggucggggucgcgguggucc

SEQ ID NO: 18772 - RNA, 22 nt, Artificial Sequence
  Synthetic
ggggucggggucgcgguggucc

SEQ ID NO: 18773 - RNA, 23 nt, Artificial Sequence
  Synthetic
aggggucggggucgcgguggucc

SEQ ID NO: 18774 - RNA, 24 nt, Artificial Sequence
  Synthetic
caggggucggggucgcgguggucc

SEQ ID NO: 18775 - RNA, 18 nt, Artificial Sequence
  Synthetic
cuggaaucggacagcagc

SEQ ID NO: 18776 - RNA, 19 nt, Artificial Sequence
  Synthetic
ccuggaaucggacagcagc

SEQ ID NO: 18777 - RNA, 21 nt, Artificial Sequence
  Synthetic
gaccuggaaucggacagcagc

SEQ ID NO: 18778 - RNA, 22 nt, Artificial Sequence
  Synthetic
cgaccuggaaucggacagcagc

SEQ ID NO: 18779 - RNA, 23 nt, Artificial Sequence
  Synthetic
acgaccuggaaucggacagcagc

SEQ ID NO: 18780 - RNA, 24 nt, Artificial Sequence
  Synthetic
gacgaccuggaaucggacagcagc

SEQ ID NO: 18781 - RNA, 18 nt, Artificial Sequence
  Synthetic
cuugcucccccgagcagc

SEQ ID NO: 18782 - RNA, 19 nt, Artificial Sequence
  Synthetic
ucuugcucccccgagcagc

SEQ ID NO: 18783 - RNA, 21 nt, Artificial Sequence
  Synthetic
cgucuugcucccccgagcagc

SEQ ID NO: 18784 - RNA, 22 nt, Artificial Sequence
  Synthetic
ccgucuugcucccccgagcagc

SEQ ID NO: 18785 - RNA, 23 nt, Artificial Sequence
  Synthetic
accgucuugcucccccgagcagc

SEQ ID NO: 18786 - RNA, 24 nt, Artificial Sequence
  Synthetic
gaccgucuugcucccccgagcagc

SEQ ID NO: 18787 - RNA, 18 nt, Artificial Sequence
  Synthetic
augcuaauugaccucggc

SEQ ID NO: 18788 - RNA, 19 nt, Artificial Sequence
  Synthetic
uaugcuaauugaccucggc

SEQ ID NO: 18789 - RNA, 21 nt, Artificial Sequence
  Synthetic
gauaugcuaauugaccucggc

SEQ ID NO: 18790 - RNA, 22 nt, Artificial Sequence
  Synthetic
ugauaugcuaauugaccucggc

SEQ ID NO: 18791 - RNA, 23 nt, Artificial Sequence
  Synthetic
uugauaugcuaauugaccucggc

SEQ ID NO: 18792 - RNA, 24 nt, Artificial Sequence
  Synthetic
auugauaugcuaauugaccucggc

SEQ ID NO: 18793 - RNA, 18 nt, Artificial Sequence
  Synthetic
cgguccgcccgucucguc

SEQ ID NO: 18794 - RNA, 19 nt, Artificial Sequence
  Synthetic
gcgguccgcccgucucguc

SEQ ID NO: 18795 - RNA, 21 nt, Artificial Sequence
  Synthetic
cggcgguccgcccgucucguc

SEQ ID NO: 18796 - RNA, 22 nt, Artificial Sequence
  Synthetic
ccggcgguccgcccgucucguc

SEQ ID NO: 18797 - RNA, 23 nt, Artificial Sequence
  Synthetic
cccggcgguccgcccgucucguc

SEQ ID NO: 18798 - RNA, 24 nt, Artificial Sequence
  Synthetic
gcccggcgguccgcccgucucguc

SEQ ID NO: 18799 - RNA, 18 nt, Artificial Sequence
  Synthetic
gucggggucgcggugguc

SEQ ID NO: 18800 - RNA, 19 nt, Artificial Sequence
  Synthetic
ggucggggucgcggugguc

SEQ ID NO: 18801 - RNA, 21 nt, Artificial Sequence
  Synthetic
ggggucggggucgcggugguc

SEQ ID NO: 18802 - RNA, 22 nt, Artificial Sequence
  Synthetic
aggggucggggucgcggugguc

SEQ ID NO: 18803 - RNA, 23 nt, Artificial Sequence
  Synthetic
caggggucggggucgcggugguc

SEQ ID NO: 18804 - RNA, 24 nt, Artificial Sequence
  Synthetic
gcaggggucggggucgcggugguc

SEQ ID NO: 18805 - RNA, 18 nt, Artificial Sequence
  Synthetic
ccuggaaucggacagcag

SEQ ID NO: 18806 - RNA, 19 nt, Artificial Sequence
  Synthetic
accuggaaucggacagcag

SEQ ID NO: 18807 - RNA, 21 nt, Artificial Sequence
  Synthetic
cgaccuggaaucggacagcag

SEQ ID NO: 18808 - RNA, 22 nt, Artificial Sequence
  Synthetic
acgaccuggaaucggacagcag

SEQ ID NO: 18809 - RNA, 23 nt, Artificial Sequence
  Synthetic
gacgaccuggaaucggacagcag

SEQ ID NO: 18810 - RNA, 24 nt, Artificial Sequence
  Synthetic
cgacgaccuggaaucggacagcag

SEQ ID NO: 18811 - RNA, 18 nt, Artificial Sequence
  Synthetic
acauggaagacccccacg

SEQ ID NO: 18812 - RNA, 19 nt, Artificial Sequence
  Synthetic
gacauggaagacccccacg

SEQ ID NO: 18813 - RNA, 21 nt, Artificial Sequence
  Synthetic
aggacauggaagacccccacg

SEQ ID NO: 18814 - RNA, 22 nt, Artificial Sequence
  Synthetic
gaggacauggaagacccccacg

SEQ ID NO: 18815 - RNA, 23 nt, Artificial Sequence
  Synthetic
cgaggacauggaagacccccacg

SEQ ID NO: 18816 - RNA, 24 nt, Artificial Sequence
  Synthetic
acgaggacauggaagacccccacg

SEQ ID NO: 18817 - RNA, 18 nt, Artificial Sequence
  Synthetic
gaggacccccccgagccg

SEQ ID NO: 18818 - RNA, 19 nt, Artificial Sequence
  Synthetic
cgaggacccccccgagccg

SEQ ID NO: 18819 - RNA, 21 nt, Artificial Sequence
  Synthetic
gacgaggacccccccgagccg

SEQ ID NO: 18820 - RNA, 22 nt, Artificial Sequence
  Synthetic
ggacgaggacccccccgagccg

SEQ ID NO: 18821 - RNA, 23 nt, Artificial Sequence
  Synthetic
uggacgaggacccccccgagccg

SEQ ID NO: 18822 - RNA, 24 nt, Artificial Sequence
  Synthetic
cuggacgaggacccccccgagccg

SEQ ID NO: 18823 - RNA, 18 nt, Artificial Sequence
  Synthetic
acccagacgccucguccg

SEQ ID NO: 18824 - RNA, 19 nt, Artificial Sequence
  Synthetic
cacccagacgccucguccg

SEQ ID NO: 18825 - RNA, 21 nt, Artificial Sequence
  Synthetic
agcacccagacgccucguccg

SEQ ID NO: 18826 - RNA, 22 nt, Artificial Sequence
  Synthetic
cagcacccagacgccucguccg

SEQ ID NO: 18827 - RNA, 23 nt, Artificial Sequence
  Synthetic
ccagcacccagacgccucguccg

SEQ ID NO: 18828 - RNA, 24 nt, Artificial Sequence
  Synthetic
cccagcacccagacgccucguccg

SEQ ID NO: 18829 - RNA, 18 nt, Artificial Sequence
  Synthetic
aagcccagccugcccgcg

SEQ ID NO: 18830 - RNA, 19 nt, Artificial Sequence
  Synthetic
aaagcccagccugcccgcg

SEQ ID NO: 18831 - RNA, 21 nt, Artificial Sequence
  Synthetic
ccaaagcccagccugcccgcg

SEQ ID NO: 18832 - RNA, 22 nt, Artificial Sequence
  Synthetic
accaaagcccagccugcccgcg

SEQ ID NO: 18833 - RNA, 23 nt, Artificial Sequence
  Synthetic
gaccaaagcccagccugcccgcg

SEQ ID NO: 18834 - RNA, 24 nt, Artificial Sequence
  Synthetic
cgaccaaagcccagccugcccgcg

SEQ ID NO: 18835 - RNA, 18 nt, Artificial Sequence
  Synthetic
gacccccccgagccggcg

SEQ ID NO: 18836 - RNA, 19 nt, Artificial Sequence
  Synthetic
ggacccccccgagccggcg

SEQ ID NO: 18837 - RNA, 21 nt, Artificial Sequence
  Synthetic
gaggacccccccgagccggcg

SEQ ID NO: 18838 - RNA, 22 nt, Artificial Sequence
  Synthetic
cgaggacccccccgagccggcg

SEQ ID NO: 18839 - RNA, 23 nt, Artificial Sequence
  Synthetic
acgaggacccccccgagccggcg

SEQ ID NO: 18840 - RNA, 24 nt, Artificial Sequence
  Synthetic
gacgaggacccccccgagccggcg

SEQ ID NO: 18841 - RNA, 18 nt, Artificial Sequence
  Synthetic
agcggggaguguuccucg

SEQ ID NO: 18842 - RNA, 19 nt, Artificial Sequence
  Synthetic
cagcggggaguguuccucg

SEQ ID NO: 18843 - RNA, 21 nt, Artificial Sequence
  Synthetic
agcagcggggaguguuccucg

SEQ ID NO: 18844 - RNA, 22 nt, Artificial Sequence
  Synthetic
cagcagcggggaguguuccucg

SEQ ID NO: 18845 - RNA, 23 nt, Artificial Sequence
  Synthetic
acagcagcggggaguguuccucg

SEQ ID NO: 18846 - RNA, 24 nt, Artificial Sequence
  Synthetic
gacagcagcggggaguguuccucg

SEQ ID NO: 18847 - RNA, 18 nt, Artificial Sequence
  Synthetic
cggacgccgugggcgucg

SEQ ID NO: 18848 - RNA, 19 nt, Artificial Sequence
  Synthetic
gcggacgccgugggcgucg

SEQ ID NO: 18849 - RNA, 21 nt, Artificial Sequence
  Synthetic
cggcggacgccgugggcgucg

SEQ ID NO: 18850 - RNA, 22 nt, Artificial Sequence
  Synthetic
gcggcggacgccgugggcgucg

SEQ ID NO: 18851 - RNA, 23 nt, Artificial Sequence
  Synthetic
cgcggcggacgccgugggcgucg

SEQ ID NO: 18852 - RNA, 24 nt, Artificial Sequence
  Synthetic
ccgcggcggacgccgugggcgucg

SEQ ID NO: 18853 - RNA, 18 nt, Artificial Sequence
  Synthetic
aagacccccacggagagg

SEQ ID NO: 18854 - RNA, 19 nt, Artificial Sequence
  Synthetic
gaagacccccacggagagg

SEQ ID NO: 18855 - RNA, 21 nt, Artificial Sequence
  Synthetic
uggaagacccccacggagagg

SEQ ID NO: 18856 - RNA, 22 nt, Artificial Sequence
  Synthetic
auggaagacccccacggagagg

SEQ ID NO: 18857 - RNA, 23 nt, Artificial Sequence
  Synthetic
cauggaagacccccacggagagg

SEQ ID NO: 18858 - RNA, 24 nt, Artificial Sequence
  Synthetic
acauggaagacccccacggagagg

SEQ ID NO: 18859 - RNA, 18 nt, Artificial Sequence
  Synthetic
aggacccccccgagccgg

SEQ ID NO: 18860 - RNA, 19 nt, Artificial Sequence
  Synthetic
gaggacccccccgagccgg

SEQ ID NO: 18861 - RNA, 21 nt, Artificial Sequence
  Synthetic
acgaggacccccccgagccgg

SEQ ID NO: 18862 - RNA, 22 nt, Artificial Sequence
  Synthetic
gacgaggacccccccgagccgg

SEQ ID NO: 18863 - RNA, 23 nt, Artificial Sequence
  Synthetic
ggacgaggacccccccgagccgg

SEQ ID NO: 18864 - RNA, 24 nt, Artificial Sequence
  Synthetic
uggacgaggacccccccgagccgg

SEQ ID NO: 18865 - RNA, 18 nt, Artificial Sequence
  Synthetic
ccucguccgacggagcgg

SEQ ID NO: 18866 - RNA, 19 nt, Artificial Sequence
  Synthetic
gccucguccgacggagcgg

SEQ ID NO: 18867 - RNA, 21 nt, Artificial Sequence
  Synthetic
acgccucguccgacggagcgg

SEQ ID NO: 18868 - RNA, 22 nt, Artificial Sequence
  Synthetic
gacgccucguccgacggagcgg

SEQ ID NO: 18869 - RNA, 23 nt, Artificial Sequence
  Synthetic
agacgccucguccgacggagcgg

SEQ ID NO: 18870 - RNA, 24 nt, Artificial Sequence
  Synthetic
cagacgccucguccgacggagcgg

SEQ ID NO: 18871 - RNA, 18 nt, Artificial Sequence
  Synthetic
gggaguguuccucgucgg

SEQ ID NO: 18872 - RNA, 19 nt, Artificial Sequence
  Synthetic
ggggaguguuccucgucgg

SEQ ID NO: 18873 - RNA, 21 nt, Artificial Sequence
  Synthetic
gcggggaguguuccucgucgg

SEQ ID NO: 18874 - RNA, 22 nt, Artificial Sequence
  Synthetic
agcggggaguguuccucgucgg

SEQ ID NO: 18875 - RNA, 23 nt, Artificial Sequence
  Synthetic
cagcggggaguguuccucgucgg

SEQ ID NO: 18876 - RNA, 24 nt, Artificial Sequence
  Synthetic
gcagcggggaguguuccucgucgg

SEQ ID NO: 18877 - RNA, 18 nt, Artificial Sequence
  Synthetic
ccgugggcgucgcagggg

SEQ ID NO: 18878 - RNA, 19 nt, Artificial Sequence
  Synthetic
gccgugggcgucgcagggg

SEQ ID NO: 18879 - RNA, 21 nt, Artificial Sequence
  Synthetic
acgccgugggcgucgcagggg

SEQ ID NO: 18880 - RNA, 22 nt, Artificial Sequence
  Synthetic
gacgccgugggcgucgcagggg

SEQ ID NO: 18881 - RNA, 23 nt, Artificial Sequence
  Synthetic
ggacgccgugggcgucgcagggg

SEQ ID NO: 18882 - RNA, 24 nt, Artificial Sequence
  Synthetic
cggacgccgugggcgucgcagggg

SEQ ID NO: 18883 - RNA, 18 nt, Artificial Sequence
  Synthetic
ucuccgacagcgaucugg

SEQ ID NO: 18884 - RNA, 19 nt, Artificial Sequence
  Synthetic
cucuccgacagcgaucugg

SEQ ID NO: 18885 - RNA, 21 nt, Artificial Sequence
  Synthetic
accucuccgacagcgaucugg

SEQ ID NO: 18886 - RNA, 22 nt, Artificial Sequence
  Synthetic
gaccucuccgacagcgaucugg

SEQ ID NO: 18887 - RNA, 23 nt, Artificial Sequence
  Synthetic
ggaccucuccgacagcgaucugg

SEQ ID NO: 18888 - RNA, 24 nt, Artificial Sequence
  Synthetic
uggaccucuccgacagcgaucugg

SEQ ID NO: 18889 - RNA, 18 nt, Artificial Sequence
  Synthetic
gaaccaaucgcaacccug

SEQ ID NO: 18890 - RNA, 19 nt, Artificial Sequence
  Synthetic
agaaccaaucgcaacccug

SEQ ID NO: 18891 - RNA, 21 nt, Artificial Sequence
  Synthetic
ccagaaccaaucgcaacccug

SEQ ID NO: 18892 - RNA, 22 nt, Artificial Sequence
  Synthetic
cccagaaccaaucgcaacccug

SEQ ID NO: 18893 - RNA, 23 nt, Artificial Sequence
  Synthetic
ccccagaaccaaucgcaacccug

SEQ ID NO: 18894 - RNA, 24 nt, Artificial Sequence
  Synthetic
cccccagaaccaaucgcaacccug

SEQ ID NO: 18895 - RNA, 18 nt, Artificial Sequence
  Synthetic
ggggcugccgaugguuug

SEQ ID NO: 18896 - RNA, 19 nt, Artificial Sequence
  Synthetic
cggggcugccgaugguuug

SEQ ID NO: 18897 - RNA, 21 nt, Artificial Sequence
  Synthetic
cccggggcugccgaugguuug

SEQ ID NO: 18898 - RNA, 22 nt, Artificial Sequence
  Synthetic
ucccggggcugccgaugguuug

SEQ ID NO: 18899 - RNA, 23 nt, Artificial Sequence
  Synthetic
gucccggggcugccgaugguuug

SEQ ID NO: 18900 - RNA, 24 nt, Artificial Sequence
  Synthetic
ggucccggggcugccgaugguuug

SEQ ID NO: 18901 - RNA, 18 nt, Artificial Sequence
  Synthetic
gaccucuccgacagcgau

SEQ ID NO: 18902 - RNA, 19 nt, Artificial Sequence
  Synthetic
ggaccucuccgacagcgau

SEQ ID NO: 18903 - RNA, 21 nt, Artificial Sequence
  Synthetic
cuggaccucuccgacagcgau

SEQ ID NO: 18904 - RNA, 22 nt, Artificial Sequence
  Synthetic
ccuggaccucuccgacagcgau

SEQ ID NO: 18905 - RNA, 23 nt, Artificial Sequence
  Synthetic
gccuggaccucuccgacagcgau

SEQ ID NO: 18906 - RNA, 24 nt, Artificial Sequence
  Synthetic
ggccuggaccucuccgacagcgau

SEQ ID NO: 18907 - RNA, 18 nt, Artificial Sequence
  Synthetic
agaaccaaucgcaacccu

SEQ ID NO: 18908 - RNA, 19 nt, Artificial Sequence
  Synthetic
cagaaccaaucgcaacccu

SEQ ID NO: 18909 - RNA, 21 nt, Artificial Sequence
  Synthetic
cccagaaccaaucgcaacccu

SEQ ID NO: 18910 - RNA, 22 nt, Artificial Sequence
  Synthetic
ccccagaaccaaucgcaacccu

SEQ ID NO: 18911 - RNA, 23 nt, Artificial Sequence
  Synthetic
cccccagaaccaaucgcaacccu

SEQ ID NO: 18912 - RNA, 24 nt, Artificial Sequence
  Synthetic
gcccccagaaccaaucgcaacccu

SEQ ID NO: 18913 - RNA, 18 nt, Artificial Sequence
  Synthetic
caguguguggucgcgccu

SEQ ID NO: 18914 - RNA, 19 nt, Artificial Sequence
  Synthetic
acaguguguggucgcgccu

SEQ ID NO: 18915 - RNA, 21 nt, Artificial Sequence
  Synthetic
ccacaguguguggucgcgccu

SEQ ID NO: 18916 - RNA, 22 nt, Artificial Sequence
  Synthetic
cccacaguguguggucgcgccu

SEQ ID NO: 18917 - RNA, 23 nt, Artificial Sequence
  Synthetic
ccccacaguguguggucgcgccu

SEQ ID NO: 18918 - RNA, 24 nt, Artificial Sequence
  Synthetic
gccccacaguguguggucgcgccu

SEQ ID NO: 18919 - RNA, 18 nt, Artificial Sequence
  Synthetic
gaaacggcugccccccaa

SEQ ID NO: 18920 - RNA, 19 nt, Artificial Sequence
  Synthetic
ggaaacggcugccccccaa

SEQ ID NO: 18921 - RNA, 22 nt, Artificial Sequence
  Synthetic
gcgggaaacggcugccccccaa

SEQ ID NO: 18922 - RNA, 23 nt, Artificial Sequence
  Synthetic
ggcgggaaacggcugccccccaa

SEQ ID NO: 18923 - RNA, 19 nt, Artificial Sequence
  Synthetic
gccgcggucgucccgauaa

SEQ ID NO: 18924 - RNA, 24 nt, Artificial Sequence
  Synthetic
gcacagccgcggucgucccgauaa

SEQ ID NO: 18925 - RNA, 21 nt, Artificial Sequence
  Synthetic
guuuuuauuguaccuaaaaca

SEQ ID NO: 18926 - RNA, 19 nt, Artificial Sequence
  Synthetic
gccccggggcggggucccc

SEQ ID NO: 18927 - RNA, 22 nt, Artificial Sequence
  Synthetic
gccuuggcggucgaugcggccc

SEQ ID NO: 18928 - RNA, 23 nt, Artificial Sequence
  Synthetic
ggccuuggcggucgaugcggccc

SEQ ID NO: 18929 - RNA, 18 nt, Artificial Sequence
  Synthetic
gcuccggggccggggcgc

SEQ ID NO: 18930 - RNA, 18 nt, Artificial Sequence
  Synthetic
gcgguuggcgagccuggc

SEQ ID NO: 18931 - RNA, 21 nt, Artificial Sequence
  Synthetic
gacgcgguuggcgagccuggc

SEQ ID NO: 18932 - RNA, 23 nt, Artificial Sequence
  Synthetic
gaacacuccuggcggugcguguc

SEQ ID NO: 18933 - RNA, 18 nt, Artificial Sequence
  Synthetic
gccagaaugacaaacacg

SEQ ID NO: 18934 - RNA, 19 nt, Artificial Sequence
  Synthetic
ggccagaaugacaaacacg

SEQ ID NO: 18935 - RNA, 23 nt, Artificial Sequence
  Synthetic
gccuggccagaaugacaaacacg

SEQ ID NO: 18936 - RNA, 18 nt, Artificial Sequence
  Synthetic
guguccgcuggccuccgg

SEQ ID NO: 18937 - RNA, 23 nt, Artificial Sequence
  Synthetic
gccccguguccgcuggccuccgg

SEQ ID NO: 18938 - RNA, 18 nt, Artificial Sequence
  Synthetic
gccagcgucauuagcggg

SEQ ID NO: 18939 - RNA, 24 nt, Artificial Sequence
  Synthetic
gcaaucgccagcgucauuagcggg

SEQ ID NO: 18940 - RNA, 18 nt, Artificial Sequence
  Synthetic
guccaccccgccccgggg

SEQ ID NO: 18941 - RNA, 22 nt, Artificial Sequence
  Synthetic
guccguccaccccgccccgggg

SEQ ID NO: 18942 - RNA, 18 nt, Artificial Sequence
  Synthetic
gcgcagcggcagguugug

SEQ ID NO: 18943 - RNA, 19 nt, Artificial Sequence
  Synthetic
ggcgcagcggcagguugug

SEQ ID NO: 18944 - RNA, 20 nt, Artificial Sequence
  Synthetic
gggcgcagcggcagguugug

SEQ ID NO: 18945 - RNA, 21 nt, Artificial Sequence
  Synthetic
ggggcgcagcggcagguugug

SEQ ID NO: 18946 - RNA, 22 nt, Artificial Sequence
  Synthetic
gggggcgcagcggcagguugug

SEQ ID NO: 18947 - RNA, 19 nt, Artificial Sequence
  Synthetic
gccccguguccgcuggccu

SEQ ID NO: 18948 - RNA, 23 nt, Artificial Sequence
  Synthetic
gcacgccccguguccgcuggccu

SEQ ID NO: 18949 - RNA, 22 nt, Artificial Sequence
  Synthetic
gaaauccuagacacgcaccgcc

SEQ ID NO: 18950 - RNA, 18 nt, Artificial Sequence
  Synthetic
gggcagccguuucccgcc

SEQ ID NO: 18951 - RNA, 19 nt, Artificial Sequence
  Synthetic
ggggcagccguuucccgcc

SEQ ID NO: 18952 - RNA, 21 nt, Artificial Sequence
  Synthetic
ggggggcagccguuucccgcc

SEQ ID NO: 18953 - RNA, 21 nt, Artificial Sequence
  Synthetic
gcccuuugacgccgagaccag

SEQ ID NO: 18954 - RNA, 22 nt, Artificial Sequence
  Synthetic
ggcccuuugacgccgagaccag

SEQ ID NO: 18955 - RNA, 23 nt, Artificial Sequence
  Synthetic
gggcccuuugacgccgagaccag

SEQ ID NO: 18956 - RNA, 18 nt, Artificial Sequence
  Synthetic
ggggaccccgccccgggg

SEQ ID NO: 18957 - RNA, 19 nt, Artificial Sequence
  Synthetic
gggggaccccgccccgggg

SEQ ID NO: 18958 - RNA, 18 nt, Artificial Sequence
  Synthetic
gggacgaccgcggcugug

SEQ ID NO: 18959 - RNA, 19 nt, Artificial Sequence
  Synthetic
gaguguucgagucgugucu

SEQ ID NO: 18960 - RNA, 24 nt, Artificial Sequence
  Synthetic
gccaggaguguucgagucgugucu

SEQ ID NO: 18961 - RNA, 21 nt, Artificial Sequence
  Synthetic
gacacgcaccgccaggagugu

SEQ ID NO: 18962 - RNA, 24 nt, Artificial Sequence
  Synthetic
gaucgacuacgcgacccuuggugu

SEQ ID NO: 18963 - RNA, 21 nt, Artificial Sequence
  Synthetic
cgggaaacggcugccccccaa

SEQ ID NO: 18964 - RNA, 24 nt, Artificial Sequence
  Synthetic
cggcgggaaacggcugccccccaa

SEQ ID NO: 18965 - RNA, 18 nt, Artificial Sequence
  Synthetic
ccgcggucgucccgauaa

SEQ ID NO: 18966 - RNA, 21 nt, Artificial Sequence
  Synthetic
cagccgcggucgucccgauaa

SEQ ID NO: 18967 - RNA, 22 nt, Artificial Sequence
  Synthetic
acagccgcggucgucccgauaa

SEQ ID NO: 18968 - RNA, 23 nt, Artificial Sequence
  Synthetic
cacagccgcggucgucccgauaa

SEQ ID NO: 18969 - RNA, 18 nt, Artificial Sequence
  Synthetic
uuuauuguaccuaaaaca

SEQ ID NO: 18970 - RNA, 19 nt, Artificial Sequence
  Synthetic
uuuuauuguaccuaaaaca

SEQ ID NO: 18971 - RNA, 22 nt, Artificial Sequence
  Synthetic
uguuuuuauuguaccuaaaaca

SEQ ID NO: 18972 - RNA, 23 nt, Artificial Sequence
  Synthetic
uuguuuuuauuguaccuaaaaca

SEQ ID NO: 18973 - RNA, 24 nt, Artificial Sequence
  Synthetic
uuuguuuuuauuguaccuaaaaca

SEQ ID NO: 18974 - RNA, 18 nt, Artificial Sequence
  Synthetic
cucuccgaccccgacacc

SEQ ID NO: 18975 - RNA, 19 nt, Artificial Sequence
  Synthetic
ucucuccgaccccgacacc

SEQ ID NO: 18976 - RNA, 20 nt, Artificial Sequence
  Synthetic
uucucuccgaccccgacacc

SEQ ID NO: 18977 - RNA, 21 nt, Artificial Sequence
  Synthetic
cuucucuccgaccccgacacc

SEQ ID NO: 18978 - RNA, 22 nt, Artificial Sequence
  Synthetic
ucuucucuccgaccccgacacc

SEQ ID NO: 18979 - RNA, 23 nt, Artificial Sequence
  Synthetic
aucuucucuccgaccccgacacc

SEQ ID NO: 18980 - RNA, 24 nt, Artificial Sequence
  Synthetic
caucuucucuccgaccccgacacc

SEQ ID NO: 18981 - RNA, 18 nt, Artificial Sequence
  Synthetic
ccccggggcggggucccc

SEQ ID NO: 18982 - RNA, 20 nt, Artificial Sequence
  Synthetic
cgccccggggcggggucccc

SEQ ID NO: 18983 - RNA, 21 nt, Artificial Sequence
  Synthetic
ccgccccggggcggggucccc

SEQ ID NO: 18984 - RNA, 22 nt, Artificial Sequence
  Synthetic
cccgccccggggcggggucccc

SEQ ID NO: 18985 - RNA, 23 nt, Artificial Sequence
  Synthetic
ccccgccccggggcggggucccc

SEQ ID NO: 18986 - RNA, 24 nt, Artificial Sequence
  Synthetic
accccgccccggggcggggucccc

SEQ ID NO: 18987 - RNA, 18 nt, Artificial Sequence
  Synthetic
uggcggucgaugcggccc

SEQ ID NO: 18988 - RNA, 19 nt, Artificial Sequence
  Synthetic
uuggcggucgaugcggccc

SEQ ID NO: 18989 - RNA, 20 nt, Artificial Sequence
  Synthetic
cuuggcggucgaugcggccc

SEQ ID NO: 18990 - RNA, 21 nt, Artificial Sequence
  Synthetic
ccuuggcggucgaugcggccc

SEQ ID NO: 18991 - RNA, 24 nt, Artificial Sequence
  Synthetic
uggccuuggcggucgaugcggccc

SEQ ID NO: 18992 - RNA, 19 nt, Artificial Sequence
  Synthetic
cgcuccggggccggggcgc

SEQ ID NO: 18993 - RNA, 21 nt, Artificial Sequence
  Synthetic
uucgcuccggggccggggcgc

SEQ ID NO: 18994 - RNA, 22 nt, Artificial Sequence
  Synthetic
uuucgcuccggggccggggcgc

SEQ ID NO: 18995 - RNA, 23 nt, Artificial Sequence
  Synthetic
cuuucgcuccggggccggggcgc

SEQ ID NO: 18996 - RNA, 24 nt, Artificial Sequence
  Synthetic
ccuuucgcuccggggccggggcgc

SEQ ID NO: 18997 - RNA, 19 nt, Artificial Sequence
  Synthetic
cgcgguuggcgagccuggc

SEQ ID NO: 18998 - RNA, 20 nt, Artificial Sequence
  Synthetic
acgcgguuggcgagccuggc

SEQ ID NO: 18999 - RNA, 22 nt, Artificial Sequence
  Synthetic
cgacgcgguuggcgagccuggc

SEQ ID NO: 19000 - RNA, 23 nt, Artificial Sequence
  Synthetic
ucgacgcgguuggcgagccuggc

SEQ ID NO: 19001 - RNA, 24 nt, Artificial Sequence
  Synthetic
cucgacgcgguuggcgagccuggc

SEQ ID NO: 19002 - RNA, 18 nt, Artificial Sequence
  Synthetic
cuccuggcggugcguguc

SEQ ID NO: 19003 - RNA, 19 nt, Artificial Sequence
  Synthetic
acuccuggcggugcguguc

SEQ ID NO: 19004 - RNA, 20 nt, Artificial Sequence
  Synthetic
cacuccuggcggugcguguc

SEQ ID NO: 19005 - RNA, 21 nt, Artificial Sequence
  Synthetic
acacuccuggcggugcguguc

SEQ ID NO: 19006 - RNA, 22 nt, Artificial Sequence
  Synthetic
aacacuccuggcggugcguguc

SEQ ID NO: 19007 - RNA, 24 nt, Artificial Sequence
  Synthetic
cgaacacuccuggcggugcguguc

SEQ ID NO: 19008 - RNA, 20 nt, Artificial Sequence
  Synthetic
uggccagaaugacaaacacg

SEQ ID NO: 19009 - RNA, 21 nt, Artificial Sequence
  Synthetic
cuggccagaaugacaaacacg

SEQ ID NO: 19010 - RNA, 22 nt, Artificial Sequence
  Synthetic
ccuggccagaaugacaaacacg

SEQ ID NO: 19011 - RNA, 24 nt, Artificial Sequence
  Synthetic
agccuggccagaaugacaaacacg

SEQ ID NO: 19012 - RNA, 19 nt, Artificial Sequence
  Synthetic
cguguccgcuggccuccgg

SEQ ID NO: 19013 - RNA, 20 nt, Artificial Sequence
  Synthetic
ccguguccgcuggccuccgg

SEQ ID NO: 19014 - RNA, 21 nt, Artificial Sequence
  Synthetic
cccguguccgcuggccuccgg

SEQ ID NO: 19015 - RNA, 22 nt, Artificial Sequence
  Synthetic
ccccguguccgcuggccuccgg

SEQ ID NO: 19016 - RNA, 24 nt, Artificial Sequence
  Synthetic
cgccccguguccgcuggccuccgg

SEQ ID NO: 19017 - RNA, 19 nt, Artificial Sequence
  Synthetic
cgccagcgucauuagcggg

SEQ ID NO: 19018 - RNA, 21 nt, Artificial Sequence
  Synthetic
aucgccagcgucauuagcggg

SEQ ID NO: 19019 - RNA, 22 nt, Artificial Sequence
  Synthetic
aaucgccagcgucauuagcggg

SEQ ID NO: 19020 - RNA, 23 nt, Artificial Sequence
  Synthetic
caaucgccagcgucauuagcggg

SEQ ID NO: 19021 - RNA, 19 nt, Artificial Sequence
  Synthetic
cguccaccccgccccgggg

SEQ ID NO: 19022 - RNA, 21 nt, Artificial Sequence
  Synthetic
uccguccaccccgccccgggg

SEQ ID NO: 19023 - RNA, 23 nt, Artificial Sequence
  Synthetic
cguccguccaccccgccccgggg

SEQ ID NO: 19024 - RNA, 24 nt, Artificial Sequence
  Synthetic
ccguccguccaccccgccccgggg

SEQ ID NO: 19025 - RNA, 23 nt, Artificial Sequence
  Synthetic
ugggggcgcagcggcagguugug

SEQ ID NO: 19026 - RNA, 24 nt, Artificial Sequence
  Synthetic
cugggggcgcagcggcagguugug

SEQ ID NO: 19027 - RNA, 18 nt, Artificial Sequence
  Synthetic
ccccguguccgcuggccu

SEQ ID NO: 19028 - RNA, 20 nt, Artificial Sequence
  Synthetic
cgccccguguccgcuggccu

SEQ ID NO: 19029 - RNA, 21 nt, Artificial Sequence
  Synthetic
acgccccguguccgcuggccu

SEQ ID NO: 19030 - RNA, 22 nt, Artificial Sequence
  Synthetic
cacgccccguguccgcuggccu

SEQ ID NO: 19031 - RNA, 24 nt, Artificial Sequence
  Synthetic
cgcacgccccguguccgcuggccu

SEQ ID NO: 19032 - RNA, 18 nt, Artificial Sequence
  Synthetic
uccuagacacgcaccgcc

SEQ ID NO: 19033 - RNA, 19 nt, Artificial Sequence
  Synthetic
auccuagacacgcaccgcc

SEQ ID NO: 19034 - RNA, 21 nt, Artificial Sequence
  Synthetic
aaauccuagacacgcaccgcc

SEQ ID NO: 19035 - RNA, 23 nt, Artificial Sequence
  Synthetic
cgaaauccuagacacgcaccgcc

SEQ ID NO: 19036 - RNA, 24 nt, Artificial Sequence
  Synthetic
ucgaaauccuagacacgcaccgcc

SEQ ID NO: 19037 - RNA, 22 nt, Artificial Sequence
  Synthetic
uggggggcagccguuucccgcc

SEQ ID NO: 19038 - RNA, 23 nt, Artificial Sequence
  Synthetic
uuggggggcagccguuucccgcc

SEQ ID NO: 19039 - RNA, 24 nt, Artificial Sequence
  Synthetic
uuuggggggcagccguuucccgcc

SEQ ID NO: 19040 - RNA, 18 nt, Artificial Sequence
  Synthetic
cuuugacgccgagaccag

SEQ ID NO: 19041 - RNA, 19 nt, Artificial Sequence
  Synthetic
ccuuugacgccgagaccag

SEQ ID NO: 19042 - RNA, 24 nt, Artificial Sequence
  Synthetic
agggcccuuugacgccgagaccag

SEQ ID NO: 19043 - RNA, 21 nt, Artificial Sequence
  Synthetic
cugggggaccccgccccgggg

SEQ ID NO: 19044 - RNA, 22 nt, Artificial Sequence
  Synthetic
ccugggggaccccgccccgggg

SEQ ID NO: 19045 - RNA, 23 nt, Artificial Sequence
  Synthetic
cccugggggaccccgccccgggg

SEQ ID NO: 19046 - RNA, 24 nt, Artificial Sequence
  Synthetic
acccugggggaccccgccccgggg

SEQ ID NO: 19047 - RNA, 19 nt, Artificial Sequence
  Synthetic
cgggacgaccgcggcugug

SEQ ID NO: 19048 - RNA, 21 nt, Artificial Sequence
  Synthetic
aucgggacgaccgcggcugug

SEQ ID NO: 19049 - RNA, 22 nt, Artificial Sequence
  Synthetic
uaucgggacgaccgcggcugug

SEQ ID NO: 19050 - RNA, 23 nt, Artificial Sequence
  Synthetic
uuaucgggacgaccgcggcugug

SEQ ID NO: 19051 - RNA, 24 nt, Artificial Sequence
  Synthetic
auuaucgggacgaccgcggcugug

SEQ ID NO: 19052 - RNA, 18 nt, Artificial Sequence
  Synthetic
aguguucgagucgugucu

SEQ ID NO: 19053 - RNA, 21 nt, Artificial Sequence
  Synthetic
aggaguguucgagucgugucu

SEQ ID NO: 19054 - RNA, 22 nt, Artificial Sequence
  Synthetic
caggaguguucgagucgugucu

SEQ ID NO: 19055 - RNA, 23 nt, Artificial Sequence
  Synthetic
ccaggaguguucgagucgugucu

SEQ ID NO: 19056 - RNA, 18 nt, Artificial Sequence
  Synthetic
acgcaccgccaggagugu

SEQ ID NO: 19057 - RNA, 19 nt, Artificial Sequence
  Synthetic
cacgcaccgccaggagugu

SEQ ID NO: 19058 - RNA, 22 nt, Artificial Sequence
  Synthetic
agacacgcaccgccaggagugu

SEQ ID NO: 19059 - RNA, 23 nt, Artificial Sequence
  Synthetic
uagacacgcaccgccaggagugu

SEQ ID NO: 19060 - RNA, 24 nt, Artificial Sequence
  Synthetic
cuagacacgcaccgccaggagugu

SEQ ID NO: 19061 - RNA, 18 nt, Artificial Sequence
  Synthetic
cuacgcgacccuuggugu

SEQ ID NO: 19062 - RNA, 19 nt, Artificial Sequence
  Synthetic
acuacgcgacccuuggugu

SEQ ID NO: 19063 - RNA, 21 nt, Artificial Sequence
  Synthetic
cgacuacgcgacccuuggugu

SEQ ID NO: 19064 - RNA, 22 nt, Artificial Sequence
  Synthetic
ucgacuacgcgacccuuggugu

SEQ ID NO: 19065 - RNA, 23 nt, Artificial Sequence
  Synthetic
aucgacuacgcgacccuuggugu

SEQ ID NO: 19066 - RNA, 18 nt, Artificial Sequence
  Synthetic
uuuuuauuguaccuaaaa

SEQ ID NO: 19067 - RNA, 19 nt, Artificial Sequence
  Synthetic
guuuuuauuguaccuaaaa

SEQ ID NO: 19068 - RNA, 20 nt, Artificial Sequence
  Synthetic
uguuuuuauuguaccuaaaa

SEQ ID NO: 19069 - RNA, 21 nt, Artificial Sequence
  Synthetic
uuguuuuuauuguaccuaaaa

SEQ ID NO: 19070 - RNA, 22 nt, Artificial Sequence
  Synthetic
uuuguuuuuauuguaccuaaaa

SEQ ID NO: 19071 - RNA, 23 nt, Artificial Sequence
  Synthetic
uuuuguuuuuauuguaccuaaaa

SEQ ID NO: 19072 - RNA, 24 nt, Artificial Sequence
  Synthetic
guuuuguuuuuauuguaccuaaaa

SEQ ID NO: 19073 - RNA, 18 nt, Artificial Sequence
  Synthetic
ggaaacggcugcccccca

SEQ ID NO: 19074 - RNA, 19 nt, Artificial Sequence
  Synthetic
gggaaacggcugcccccca

SEQ ID NO: 19075 - RNA, 20 nt, Artificial Sequence
  Synthetic
cgggaaacggcugcccccca

SEQ ID NO: 19076 - RNA, 21 nt, Artificial Sequence
  Synthetic
gcgggaaacggcugcccccca

SEQ ID NO: 19077 - RNA, 22 nt, Artificial Sequence
  Synthetic
ggcgggaaacggcugcccccca

SEQ ID NO: 19078 - RNA, 23 nt, Artificial Sequence
  Synthetic
cggcgggaaacggcugcccccca

SEQ ID NO: 19079 - RNA, 24 nt, Artificial Sequence
  Synthetic
gcggcgggaaacggcugcccccca

SEQ ID NO: 19080 - RNA, 18 nt, Artificial Sequence
  Synthetic
ccgcgccacgccucgcca

SEQ ID NO: 19081 - RNA, 19 nt, Artificial Sequence
  Synthetic
gccgcgccacgccucgcca

SEQ ID NO: 19082 - RNA, 21 nt, Artificial Sequence
  Synthetic
cugccgcgccacgccucgcca

SEQ ID NO: 19083 - RNA, 22 nt, Artificial Sequence
  Synthetic
acugccgcgccacgccucgcca

SEQ ID NO: 19084 - RNA, 23 nt, Artificial Sequence
  Synthetic
cacugccgcgccacgccucgcca

SEQ ID NO: 19085 - RNA, 24 nt, Artificial Sequence
  Synthetic
ucacugccgcgccacgccucgcca

SEQ ID NO: 19086 - RNA, 18 nt, Artificial Sequence
  Synthetic
cuccuuggcccgccagca

SEQ ID NO: 19087 - RNA, 19 nt, Artificial Sequence
  Synthetic
ccuccuuggcccgccagca

SEQ ID NO: 19088 - RNA, 20 nt, Artificial Sequence
  Synthetic
cccuccuuggcccgccagca

SEQ ID NO: 19089 - RNA, 21 nt, Artificial Sequence
  Synthetic
gcccuccuuggcccgccagca

SEQ ID NO: 19090 - RNA, 22 nt, Artificial Sequence
  Synthetic
ggcccuccuuggcccgccagca

SEQ ID NO: 19091 - RNA, 23 nt, Artificial Sequence
  Synthetic
gggcccuccuuggcccgccagca

SEQ ID NO: 19092 - RNA, 24 nt, Artificial Sequence
  Synthetic
agggcccuccuuggcccgccagca

SEQ ID NO: 19093 - RNA, 18 nt, Artificial Sequence
  Synthetic
ucgcgccuucagguagca

SEQ ID NO: 19094 - RNA, 19 nt, Artificial Sequence
  Synthetic
cucgcgccuucagguagca

SEQ ID NO: 19095 - RNA, 20 nt, Artificial Sequence
  Synthetic
ccucgcgccuucagguagca

SEQ ID NO: 19096 - RNA, 21 nt, Artificial Sequence
  Synthetic
gccucgcgccuucagguagca

SEQ ID NO: 19097 - RNA, 22 nt, Artificial Sequence
  Synthetic
ggccucgcgccuucagguagca

SEQ ID NO: 19098 - RNA, 23 nt, Artificial Sequence
  Synthetic
aggccucgcgccuucagguagca

SEQ ID NO: 19099 - RNA, 24 nt, Artificial Sequence
  Synthetic
caggccucgcgccuucagguagca

SEQ ID NO: 19100 - RNA, 18 nt, Artificial Sequence
  Synthetic
cgucuggucucggcguca

SEQ ID NO: 19101 - RNA, 19 nt, Artificial Sequence
  Synthetic
ccgucuggucucggcguca

SEQ ID NO: 19102 - RNA, 20 nt, Artificial Sequence
  Synthetic
cccgucuggucucggcguca

SEQ ID NO: 19103 - RNA, 21 nt, Artificial Sequence
  Synthetic
acccgucuggucucggcguca

SEQ ID NO: 19104 - RNA, 22 nt, Artificial Sequence
  Synthetic
gacccgucuggucucggcguca

SEQ ID NO: 19105 - RNA, 23 nt, Artificial Sequence
  Synthetic
agacccgucuggucucggcguca

SEQ ID NO: 19106 - RNA, 24 nt, Artificial Sequence
  Synthetic
gagacccgucuggucucggcguca

SEQ ID NO: 19107 - RNA, 18 nt, Artificial Sequence
  Synthetic
ccgccgcgcgcucggaga

SEQ ID NO: 19108 - RNA, 19 nt, Artificial Sequence
  Synthetic
accgccgcgcgcucggaga

SEQ ID NO: 19109 - RNA, 21 nt, Artificial Sequence
  Synthetic
cgaccgccgcgcgcucggaga

SEQ ID NO: 19110 - RNA, 22 nt, Artificial Sequence
  Synthetic
ucgaccgccgcgcgcucggaga

SEQ ID NO: 19111 - RNA, 23 nt, Artificial Sequence
  Synthetic
gucgaccgccgcgcgcucggaga

SEQ ID NO: 19112 - RNA, 24 nt, Artificial Sequence
  Synthetic
ggucgaccgccgcgcgcucggaga

SEQ ID NO: 19113 - RNA, 18 nt, Artificial Sequence
  Synthetic
uucagguagcacuggaga

SEQ ID NO: 19114 - RNA, 19 nt, Artificial Sequence
  Synthetic
cuucagguagcacuggaga

SEQ ID NO: 19115 - RNA, 20 nt, Artificial Sequence
  Synthetic
ccuucagguagcacuggaga

SEQ ID NO: 19116 - RNA, 21 nt, Artificial Sequence
  Synthetic
gccuucagguagcacuggaga

SEQ ID NO: 19117 - RNA, 22 nt, Artificial Sequence
  Synthetic
cgccuucagguagcacuggaga

SEQ ID NO: 19118 - RNA, 23 nt, Artificial Sequence
  Synthetic
gcgccuucagguagcacuggaga

SEQ ID NO: 19119 - RNA, 24 nt, Artificial Sequence
  Synthetic
cgcgccuucagguagcacuggaga

SEQ ID NO: 19120 - RNA, 18 nt, Artificial Sequence
  Synthetic
uugccggcaaaagugcga

SEQ ID NO: 19121 - RNA, 19 nt, Artificial Sequence
  Synthetic
auugccggcaaaagugcga

SEQ ID NO: 19122 - RNA, 20 nt, Artificial Sequence
  Synthetic
gauugccggcaaaagugcga

SEQ ID NO: 19123 - RNA, 21 nt, Artificial Sequence
  Synthetic
ggauugccggcaaaagugcga

SEQ ID NO: 19124 - RNA, 22 nt, Artificial Sequence
  Synthetic
aggauugccggcaaaagugcga

SEQ ID NO: 19125 - RNA, 23 nt, Artificial Sequence
  Synthetic
gaggauugccggcaaaagugcga

SEQ ID NO: 19126 - RNA, 24 nt, Artificial Sequence
  Synthetic
cgaggauugccggcaaaagugcga

SEQ ID NO: 19127 - RNA, 18 nt, Artificial Sequence
  Synthetic
gccgcggucgucccgaua

SEQ ID NO: 19128 - RNA, 19 nt, Artificial Sequence
  Synthetic
agccgcggucgucccgaua

SEQ ID NO: 19129 - RNA, 20 nt, Artificial Sequence
  Synthetic
cagccgcggucgucccgaua

SEQ ID NO: 19130 - RNA, 21 nt, Artificial Sequence
  Synthetic
acagccgcggucgucccgaua

SEQ ID NO: 19131 - RNA, 22 nt, Artificial Sequence
  Synthetic
cacagccgcggucgucccgaua

SEQ ID NO: 19132 - RNA, 23 nt, Artificial Sequence
  Synthetic
gcacagccgcggucgucccgaua

SEQ ID NO: 19133 - RNA, 24 nt, Artificial Sequence
  Synthetic
agcacagccgcggucgucccgaua

SEQ ID NO: 19134 - RNA, 18 nt, Artificial Sequence
  Synthetic
auauuugccgugcacgua

SEQ ID NO: 19135 - RNA, 19 nt, Artificial Sequence
  Synthetic
aauauuugccgugcacgua

SEQ ID NO: 19136 - RNA, 21 nt, Artificial Sequence
  Synthetic
aaaauauuugccgugcacgua

SEQ ID NO: 19137 - RNA, 22 nt, Artificial Sequence
  Synthetic
aaaaauauuugccgugcacgua

SEQ ID NO: 19138 - RNA, 23 nt, Artificial Sequence
  Synthetic
uaaaaauauuugccgugcacgua

SEQ ID NO: 19139 - RNA, 24 nt, Artificial Sequence
  Synthetic
auaaaaauauuugccgugcacgua

SEQ ID NO: 19140 - RNA, 18 nt, Artificial Sequence
  Synthetic
caaucgccagcgucauua

SEQ ID NO: 19141 - RNA, 19 nt, Artificial Sequence
  Synthetic
gcaaucgccagcgucauua

SEQ ID NO: 19142 - RNA, 20 nt, Artificial Sequence
  Synthetic
ggcaaucgccagcgucauua

SEQ ID NO: 19143 - RNA, 21 nt, Artificial Sequence
  Synthetic
gggcaaucgccagcgucauua

SEQ ID NO: 19144 - RNA, 22 nt, Artificial Sequence
  Synthetic
ggggcaaucgccagcgucauua

SEQ ID NO: 19145 - RNA, 23 nt, Artificial Sequence
  Synthetic
gggggcaaucgccagcgucauua

SEQ ID NO: 19146 - RNA, 24 nt, Artificial Sequence
  Synthetic
ggggggcaaucgccagcgucauua

SEQ ID NO: 19147 - RNA, 18 nt, Artificial Sequence
  Synthetic
uuuuauuguaccuaaaac

SEQ ID NO: 19148 - RNA, 19 nt, Artificial Sequence
  Synthetic
uuuuuauuguaccuaaaac

SEQ ID NO: 19149 - RNA, 21 nt, Artificial Sequence
  Synthetic
uguuuuuauuguaccuaaaac

SEQ ID NO: 19150 - RNA, 22 nt, Artificial Sequence
  Synthetic
uuguuuuuauuguaccuaaaac

SEQ ID NO: 19151 - RNA, 23 nt, Artificial Sequence
  Synthetic
uuuguuuuuauuguaccuaaaac

SEQ ID NO: 19152 - RNA, 24 nt, Artificial Sequence
  Synthetic
uuuuguuuuuauuguaccuaaaac

SEQ ID NO: 19153 - RNA, 18 nt, Artificial Sequence
  Synthetic
cuggccagaaugacaaac

SEQ ID NO: 19154 - RNA, 19 nt, Artificial Sequence
  Synthetic
ccuggccagaaugacaaac

SEQ ID NO: 19155 - RNA, 20 nt, Artificial Sequence
  Synthetic
gccuggccagaaugacaaac

SEQ ID NO: 19156 - RNA, 21 nt, Artificial Sequence
  Synthetic
agccuggccagaaugacaaac

SEQ ID NO: 19157 - RNA, 22 nt, Artificial Sequence
  Synthetic
gagccuggccagaaugacaaac

SEQ ID NO: 19158 - RNA, 23 nt, Artificial Sequence
  Synthetic
cgagccuggccagaaugacaaac

SEQ ID NO: 19159 - RNA, 24 nt, Artificial Sequence
  Synthetic
gcgagccuggccagaaugacaaac

SEQ ID NO: 19160 - RNA, 18 nt, Artificial Sequence
  Synthetic
uccuuggcccgccagcac

SEQ ID NO: 19161 - RNA, 19 nt, Artificial Sequence
  Synthetic
cuccuuggcccgccagcac

SEQ ID NO: 19162 - RNA, 21 nt, Artificial Sequence
  Synthetic
cccuccuuggcccgccagcac

SEQ ID NO: 19163 - RNA, 22 nt, Artificial Sequence
  Synthetic
gcccuccuuggcccgccagcac

SEQ ID NO: 19164 - RNA, 23 nt, Artificial Sequence
  Synthetic
ggcccuccuuggcccgccagcac

SEQ ID NO: 19165 - RNA, 24 nt, Artificial Sequence
  Synthetic
gggcccuccuuggcccgccagcac

SEQ ID NO: 19166 - RNA, 18 nt, Artificial Sequence
  Synthetic
cgcgccuucagguagcac

SEQ ID NO: 19167 - RNA, 19 nt, Artificial Sequence
  Synthetic
ucgcgccuucagguagcac

SEQ ID NO: 19168 - RNA, 21 nt, Artificial Sequence
  Synthetic
ccucgcgccuucagguagcac

SEQ ID NO: 19169 - RNA, 22 nt, Artificial Sequence
  Synthetic
gccucgcgccuucagguagcac

SEQ ID NO: 19170 - RNA, 23 nt, Artificial Sequence
  Synthetic
ggccucgcgccuucagguagcac

SEQ ID NO: 19171 - RNA, 24 nt, Artificial Sequence
  Synthetic
aggccucgcgccuucagguagcac

SEQ ID NO: 19172 - RNA, 18 nt, Artificial Sequence
  Synthetic
ucaacucgcagacacgac

SEQ ID NO: 19173 - RNA, 19 nt, Artificial Sequence
  Synthetic
gucaacucgcagacacgac

SEQ ID NO: 19174 - RNA, 20 nt, Artificial Sequence
  Synthetic
cgucaacucgcagacacgac

SEQ ID NO: 19175 - RNA, 21 nt, Artificial Sequence
  Synthetic
ccgucaacucgcagacacgac

SEQ ID NO: 19176 - RNA, 22 nt, Artificial Sequence
  Synthetic
gccgucaacucgcagacacgac

SEQ ID NO: 19177 - RNA, 23 nt, Artificial Sequence
  Synthetic
ggccgucaacucgcagacacgac

SEQ ID NO: 19178 - RNA, 24 nt, Artificial Sequence
  Synthetic
uggccgucaacucgcagacacgac

SEQ ID NO: 19179 - RNA, 18 nt, Artificial Sequence
  Synthetic
uauuugccgugcacguac

SEQ ID NO: 19180 - RNA, 19 nt, Artificial Sequence
  Synthetic
auauuugccgugcacguac

SEQ ID NO: 19181 - RNA, 21 nt, Artificial Sequence
  Synthetic
aaauauuugccgugcacguac

SEQ ID NO: 19182 - RNA, 22 nt, Artificial Sequence
  Synthetic
aaaauauuugccgugcacguac

SEQ ID NO: 19183 - RNA, 23 nt, Artificial Sequence
  Synthetic
aaaaauauuugccgugcacguac

SEQ ID NO: 19184 - RNA, 24 nt, Artificial Sequence
  Synthetic
uaaaaauauuugccgugcacguac

SEQ ID NO: 19185 - RNA, 18 nt, Artificial Sequence
  Synthetic
gcccgccaugcaggcccc

SEQ ID NO: 19186 - RNA, 19 nt, Artificial Sequence
  Synthetic
ggcccgccaugcaggcccc

SEQ ID NO: 19187 - RNA, 21 nt, Artificial Sequence
  Synthetic
caggcccgccaugcaggcccc

SEQ ID NO: 19188 - RNA, 22 nt, Artificial Sequence
  Synthetic
ucaggcccgccaugcaggcccc

SEQ ID NO: 19189 - RNA, 23 nt, Artificial Sequence
  Synthetic
aucaggcccgccaugcaggcccc

SEQ ID NO: 19190 - RNA, 24 nt, Artificial Sequence
  Synthetic
gaucaggcccgccaugcaggcccc

SEQ ID NO: 19191 - RNA, 18 nt, Artificial Sequence
  Synthetic
cguccguccaccccgccc

SEQ ID NO: 19192 - RNA, 19 nt, Artificial Sequence
  Synthetic
ccguccguccaccccgccc

SEQ ID NO: 19193 - RNA, 21 nt, Artificial Sequence
  Synthetic
ggccguccguccaccccgccc

SEQ ID NO: 19194 - RNA, 22 nt, Artificial Sequence
  Synthetic
gggccguccguccaccccgccc

SEQ ID NO: 19195 - RNA, 23 nt, Artificial Sequence
  Synthetic
ggggccguccguccaccccgccc

SEQ ID NO: 19196 - RNA, 24 nt, Artificial Sequence
  Synthetic
cggggccguccguccaccccgccc

SEQ ID NO: 19197 - RNA, 18 nt, Artificial Sequence
  Synthetic
ggcccgccaugcaggccc

SEQ ID NO: 19198 - RNA, 19 nt, Artificial Sequence
  Synthetic
aggcccgccaugcaggccc

SEQ ID NO: 19199 - RNA, 21 nt, Artificial Sequence
  Synthetic
ucaggcccgccaugcaggccc

SEQ ID NO: 19200 - RNA, 22 nt, Artificial Sequence
  Synthetic
aucaggcccgccaugcaggccc

SEQ ID NO: 19201 - RNA, 23 nt, Artificial Sequence
  Synthetic
gaucaggcccgccaugcaggccc

SEQ ID NO: 19202 - RNA, 24 nt, Artificial Sequence
  Synthetic
cgaucaggcccgccaugcaggccc

SEQ ID NO: 19203 - RNA, 18 nt, Artificial Sequence
  Synthetic
ccgccagcaccggggccc

SEQ ID NO: 19204 - RNA, 19 nt, Artificial Sequence
  Synthetic
cccgccagcaccggggccc

SEQ ID NO: 19205 - RNA, 21 nt, Artificial Sequence
  Synthetic
ggcccgccagcaccggggccc

SEQ ID NO: 19206 - RNA, 22 nt, Artificial Sequence
  Synthetic
uggcccgccagcaccggggccc

SEQ ID NO: 19207 - RNA, 23 nt, Artificial Sequence
  Synthetic
uuggcccgccagcaccggggccc

SEQ ID NO: 19208 - RNA, 24 nt, Artificial Sequence
  Synthetic
cuuggcccgccagcaccggggccc

SEQ ID NO: 19209 - RNA, 18 nt, Artificial Sequence
  Synthetic
gggcgaccaagguuuccc

SEQ ID NO: 19210 - RNA, 19 nt, Artificial Sequence
  Synthetic
ugggcgaccaagguuuccc

SEQ ID NO: 19211 - RNA, 21 nt, Artificial Sequence
  Synthetic
cgugggcgaccaagguuuccc

SEQ ID NO: 19212 - RNA, 22 nt, Artificial Sequence
  Synthetic
ccgugggcgaccaagguuuccc

SEQ ID NO: 19213 - RNA, 23 nt, Artificial Sequence
  Synthetic
gccgugggcgaccaagguuuccc

SEQ ID NO: 19214 - RNA, 24 nt, Artificial Sequence
  Synthetic
ggccgugggcgaccaagguuuccc

SEQ ID NO: 19215 - RNA, 18 nt, Artificial Sequence
  Synthetic
ccguccguccaccccgcc

SEQ ID NO: 19216 - RNA, 19 nt, Artificial Sequence
  Synthetic
gccguccguccaccccgcc

SEQ ID NO: 19217 - RNA, 20 nt, Artificial Sequence
  Synthetic
ggccguccguccaccccgcc

SEQ ID NO: 19218 - RNA, 21 nt, Artificial Sequence
  Synthetic
gggccguccguccaccccgcc

SEQ ID NO: 19219 - RNA, 22 nt, Artificial Sequence
  Synthetic
ggggccguccguccaccccgcc

SEQ ID NO: 19220 - RNA, 23 nt, Artificial Sequence
  Synthetic
cggggccguccguccaccccgcc

SEQ ID NO: 19221 - RNA, 24 nt, Artificial Sequence
  Synthetic
ccggggccguccguccaccccgcc

SEQ ID NO: 19222 - RNA, 18 nt, Artificial Sequence
  Synthetic
uguccgccagacgccgcc

SEQ ID NO: 19223 - RNA, 19 nt, Artificial Sequence
  Synthetic
auguccgccagacgccgcc

SEQ ID NO: 19224 - RNA, 21 nt, Artificial Sequence
  Synthetic
uaauguccgccagacgccgcc

SEQ ID NO: 19225 - RNA, 22 nt, Artificial Sequence
  Synthetic
uuaauguccgccagacgccgcc

SEQ ID NO: 19226 - RNA, 23 nt, Artificial Sequence
  Synthetic
cuuaauguccgccagacgccgcc

SEQ ID NO: 19227 - RNA, 24 nt, Artificial Sequence
  Synthetic
ccuuaauguccgccagacgccgcc

SEQ ID NO: 19228 - RNA, 18 nt, Artificial Sequence
  Synthetic
gccgcgccacgccucgcc

SEQ ID NO: 19229 - RNA, 19 nt, Artificial Sequence
  Synthetic
ugccgcgccacgccucgcc

SEQ ID NO: 19230 - RNA, 20 nt, Artificial Sequence
  Synthetic
cugccgcgccacgccucgcc

SEQ ID NO: 19231 - RNA, 21 nt, Artificial Sequence
  Synthetic
acugccgcgccacgccucgcc

SEQ ID NO: 19232 - RNA, 22 nt, Artificial Sequence
  Synthetic
cacugccgcgccacgccucgcc

SEQ ID NO: 19233 - RNA, 23 nt, Artificial Sequence
  Synthetic
ucacugccgcgccacgccucgcc

SEQ ID NO: 19234 - RNA, 24 nt, Artificial Sequence
  Synthetic
cucacugccgcgccacgccucgcc

SEQ ID NO: 19235 - RNA, 18 nt, Artificial Sequence
  Synthetic
aggcccgccaugcaggcc

SEQ ID NO: 19236 - RNA, 19 nt, Artificial Sequence
  Synthetic
caggcccgccaugcaggcc

SEQ ID NO: 19237 - RNA, 21 nt, Artificial Sequence
  Synthetic
aucaggcccgccaugcaggcc

SEQ ID NO: 19238 - RNA, 22 nt, Artificial Sequence
  Synthetic
gaucaggcccgccaugcaggcc

SEQ ID NO: 19239 - RNA, 23 nt, Artificial Sequence
  Synthetic
cgaucaggcccgccaugcaggcc

SEQ ID NO: 19240 - RNA, 24 nt, Artificial Sequence
  Synthetic
ucgaucaggcccgccaugcaggcc

SEQ ID NO: 19241 - RNA, 18 nt, Artificial Sequence
  Synthetic
gcgauagaggcucgggcc

SEQ ID NO: 19242 - RNA, 19 nt, Artificial Sequence
  Synthetic
ugcgauagaggcucgggcc

SEQ ID NO: 19243 - RNA, 20 nt, Artificial Sequence
  Synthetic
gugcgauagaggcucgggcc

SEQ ID NO: 19244 - RNA, 21 nt, Artificial Sequence
  Synthetic
agugcgauagaggcucgggcc

SEQ ID NO: 19245 - RNA, 22 nt, Artificial Sequence
  Synthetic
aagugcgauagaggcucgggcc

SEQ ID NO: 19246 - RNA, 23 nt, Artificial Sequence
  Synthetic
aaagugcgauagaggcucgggcc

SEQ ID NO: 19247 - RNA, 24 nt, Artificial Sequence
  Synthetic
aaaagugcgauagaggcucgggcc

SEQ ID NO: 19248 - RNA, 18 nt, Artificial Sequence
  Synthetic
cccgccagcaccggggcc

SEQ ID NO: 19249 - RNA, 19 nt, Artificial Sequence
  Synthetic
gcccgccagcaccggggcc

SEQ ID NO: 19250 - RNA, 21 nt, Artificial Sequence
  Synthetic
uggcccgccagcaccggggcc

SEQ ID NO: 19251 - RNA, 22 nt, Artificial Sequence
  Synthetic
uuggcccgccagcaccggggcc

SEQ ID NO: 19252 - RNA, 23 nt, Artificial Sequence
  Synthetic
cuuggcccgccagcaccggggcc

SEQ ID NO: 19253 - RNA, 24 nt, Artificial Sequence
  Synthetic
ccuuggcccgccagcaccggggcc

SEQ ID NO: 19254 - RNA, 18 nt, Artificial Sequence
  Synthetic
gccggggcgcgggggucc

SEQ ID NO: 19255 - RNA, 19 nt, Artificial Sequence
  Synthetic
ggccggggcgcgggggucc

SEQ ID NO: 19256 - RNA, 21 nt, Artificial Sequence
  Synthetic
ggggccggggcgcgggggucc

SEQ ID NO: 19257 - RNA, 22 nt, Artificial Sequence
  Synthetic
cggggccggggcgcgggggucc

SEQ ID NO: 19258 - RNA, 23 nt, Artificial Sequence
  Synthetic
ccggggccggggcgcgggggucc

SEQ ID NO: 19259 - RNA, 24 nt, Artificial Sequence
  Synthetic
uccggggccggggcgcgggggucc

SEQ ID NO: 19260 - RNA, 18 nt, Artificial Sequence
  Synthetic
gucccgauaauggggucc

SEQ ID NO: 19261 - RNA, 19 nt, Artificial Sequence
  Synthetic
cgucccgauaauggggucc

SEQ ID NO: 19262 - RNA, 21 nt, Artificial Sequence
  Synthetic
gucgucccgauaauggggucc

SEQ ID NO: 19263 - RNA, 22 nt, Artificial Sequence
  Synthetic
ggucgucccgauaauggggucc

SEQ ID NO: 19264 - RNA, 23 nt, Artificial Sequence
  Synthetic
cggucgucccgauaauggggucc

SEQ ID NO: 19265 - RNA, 24 nt, Artificial Sequence
  Synthetic
gcggucgucccgauaauggggucc

SEQ ID NO: 19266 - RNA, 18 nt, Artificial Sequence
  Synthetic
ugggcgaccaagguuucc

SEQ ID NO: 19267 - RNA, 19 nt, Artificial Sequence
  Synthetic
gugggcgaccaagguuucc

SEQ ID NO: 19268 - RNA, 20 nt, Artificial Sequence
  Synthetic
cgugggcgaccaagguuucc

SEQ ID NO: 19269 - RNA, 21 nt, Artificial Sequence
  Synthetic
ccgugggcgaccaagguuucc

SEQ ID NO: 19270 - RNA, 22 nt, Artificial Sequence
  Synthetic
gccgugggcgaccaagguuucc

SEQ ID NO: 19271 - RNA, 23 nt, Artificial Sequence
  Synthetic
ggccgugggcgaccaagguuucc

SEQ ID NO: 19272 - RNA, 24 nt, Artificial Sequence
  Synthetic
gggccgugggcgaccaagguuucc

SEQ ID NO: 19273 - RNA, 18 nt, Artificial Sequence
  Synthetic
aucgccagcgucauuagc

SEQ ID NO: 19274 - RNA, 19 nt, Artificial Sequence
  Synthetic
aaucgccagcgucauuagc

SEQ ID NO: 19275 - RNA, 21 nt, Artificial Sequence
  Synthetic
gcaaucgccagcgucauuagc

SEQ ID NO: 19276 - RNA, 22 nt, Artificial Sequence
  Synthetic
ggcaaucgccagcgucauuagc

SEQ ID NO: 19277 - RNA, 23 nt, Artificial Sequence
  Synthetic
gggcaaucgccagcgucauuagc

SEQ ID NO: 19278 - RNA, 24 nt, Artificial Sequence
  Synthetic
ggggcaaucgccagcgucauuagc

SEQ ID NO: 19279 - RNA, 18 nt, Artificial Sequence
  Synthetic
cggucgaccgccgcgcgc

SEQ ID NO: 19280 - RNA, 19 nt, Artificial Sequence
  Synthetic
gcggucgaccgccgcgcgc

SEQ ID NO: 19281 - RNA, 20 nt, Artificial Sequence
  Synthetic
ugcggucgaccgccgcgcgc

SEQ ID NO: 19282 - RNA, 21 nt, Artificial Sequence
  Synthetic
augcggucgaccgccgcgcgc

SEQ ID NO: 19283 - RNA, 22 nt, Artificial Sequence
  Synthetic
gaugcggucgaccgccgcgcgc

SEQ ID NO: 19284 - RNA, 23 nt, Artificial Sequence
  Synthetic
ugaugcggucgaccgccgcgcgc

SEQ ID NO: 19285 - RNA, 24 nt, Artificial Sequence
  Synthetic
cugaugcggucgaccgccgcgcgc

SEQ ID NO: 19286 - RNA, 18 nt, Artificial Sequence
  Synthetic
ccucgccauggggggcgc

SEQ ID NO: 19287 - RNA, 19 nt, Artificial Sequence
  Synthetic
gccucgccauggggggcgc

SEQ ID NO: 19288 - RNA, 21 nt, Artificial Sequence
  Synthetic
acgccucgccauggggggcgc

SEQ ID NO: 19289 - RNA, 22 nt, Artificial Sequence
  Synthetic
cacgccucgccauggggggcgc

SEQ ID NO: 19290 - RNA, 23 nt, Artificial Sequence
  Synthetic
ccacgccucgccauggggggcgc

SEQ ID NO: 19291 - RNA, 24 nt, Artificial Sequence
  Synthetic
gccacgccucgccauggggggcgc

SEQ ID NO: 19292 - RNA, 18 nt, Artificial Sequence
  Synthetic
caaaagugcgauagaggc

SEQ ID NO: 19293 - RNA, 19 nt, Artificial Sequence
  Synthetic
gcaaaagugcgauagaggc

SEQ ID NO: 19294 - RNA, 20 nt, Artificial Sequence
  Synthetic
ggcaaaagugcgauagaggc

SEQ ID NO: 19295 - RNA, 21 nt, Artificial Sequence
  Synthetic
cggcaaaagugcgauagaggc

SEQ ID NO: 19296 - RNA, 22 nt, Artificial Sequence
  Synthetic
ccggcaaaagugcgauagaggc

SEQ ID NO: 19297 - RNA, 23 nt, Artificial Sequence
  Synthetic
gccggcaaaagugcgauagaggc

SEQ ID NO: 19298 - RNA, 24 nt, Artificial Sequence
  Synthetic
ugccggcaaaagugcgauagaggc

SEQ ID NO: 19299 - RNA, 18 nt, Artificial Sequence
  Synthetic
ccaggggcuauucgcggc

SEQ ID NO: 19300 - RNA, 19 nt, Artificial Sequence
  Synthetic
cccaggggcuauucgcggc

SEQ ID NO: 19301 - RNA, 21 nt, Artificial Sequence
  Synthetic
ggcccaggggcuauucgcggc

SEQ ID NO: 19302 - RNA, 22 nt, Artificial Sequence
  Synthetic
gggcccaggggcuauucgcggc

SEQ ID NO: 19303 - RNA, 23 nt, Artificial Sequence
  Synthetic
ggggcccaggggcuauucgcggc

SEQ ID NO: 19304 - RNA, 24 nt, Artificial Sequence
  Synthetic
cggggcccaggggcuauucgcggc

SEQ ID NO: 19305 - RNA, 18 nt, Artificial Sequence
  Synthetic
cuuggcggucgaugcggc

SEQ ID NO: 19306 - RNA, 19 nt, Artificial Sequence
  Synthetic
ccuuggcggucgaugcggc

SEQ ID NO: 19307 - RNA, 20 nt, Artificial Sequence
  Synthetic
gccuuggcggucgaugcggc

SEQ ID NO: 19308 - RNA, 21 nt, Artificial Sequence
  Synthetic
ggccuuggcggucgaugcggc

SEQ ID NO: 19309 - RNA, 22 nt, Artificial Sequence
  Synthetic
uggccuuggcggucgaugcggc

SEQ ID NO: 19310 - RNA, 23 nt, Artificial Sequence
  Synthetic
auggccuuggcggucgaugcggc

SEQ ID NO: 19311 - RNA, 24 nt, Artificial Sequence
  Synthetic
cauggccuuggcggucgaugcggc

SEQ ID NO: 19312 - RNA, 18 nt, Artificial Sequence
  Synthetic
gcgcggggguccgcgggc

SEQ ID NO: 19313 - RNA, 19 nt, Artificial Sequence
  Synthetic
ggcgcggggguccgcgggc

SEQ ID NO: 19314 - RNA, 21 nt, Artificial Sequence
  Synthetic
ggggcgcggggguccgcgggc

SEQ ID NO: 19315 - RNA, 22 nt, Artificial Sequence
  Synthetic
cggggcgcggggguccgcgggc

SEQ ID NO: 19316 - RNA, 23 nt, Artificial Sequence
  Synthetic
ccggggcgcggggguccgcgggc

SEQ ID NO: 19317 - RNA, 24 nt, Artificial Sequence
  Synthetic
gccggggcgcggggguccgcgggc

SEQ ID NO: 19318 - RNA, 18 nt, Artificial Sequence
  Synthetic
ucgcuccggggccggggc

SEQ ID NO: 19319 - RNA, 19 nt, Artificial Sequence
  Synthetic
uucgcuccggggccggggc

SEQ ID NO: 19320 - RNA, 20 nt, Artificial Sequence
  Synthetic
uuucgcuccggggccggggc

SEQ ID NO: 19321 - RNA, 21 nt, Artificial Sequence
  Synthetic
cuuucgcuccggggccggggc

SEQ ID NO: 19322 - RNA, 22 nt, Artificial Sequence
  Synthetic
ccuuucgcuccggggccggggc

SEQ ID NO: 19323 - RNA, 23 nt, Artificial Sequence
  Synthetic
gccuuucgcuccggggccggggc

SEQ ID NO: 19324 - RNA, 24 nt, Artificial Sequence
  Synthetic
cgccuuucgcuccggggccggggc

SEQ ID NO: 19325 - RNA, 18 nt, Artificial Sequence
  Synthetic
cgccuuucgcuccggggc

SEQ ID NO: 19326 - RNA, 19 nt, Artificial Sequence
  Synthetic
gcgccuuucgcuccggggc

SEQ ID NO: 19327 - RNA, 21 nt, Artificial Sequence
  Synthetic
gggcgccuuucgcuccggggc

SEQ ID NO: 19328 - RNA, 22 nt, Artificial Sequence
  Synthetic
cgggcgccuuucgcuccggggc

SEQ ID NO: 19329 - RNA, 23 nt, Artificial Sequence
  Synthetic
gcgggcgccuuucgcuccggggc

SEQ ID NO: 19330 - RNA, 24 nt, Artificial Sequence
  Synthetic
ggcgggcgccuuucgcuccggggc

SEQ ID NO: 19331 - RNA, 18 nt, Artificial Sequence
  Synthetic
ggcgggcgccuuucgcuc

SEQ ID NO: 19332 - RNA, 19 nt, Artificial Sequence
  Synthetic
cggcgggcgccuuucgcuc

SEQ ID NO: 19333 - RNA, 21 nt, Artificial Sequence
  Synthetic
ggcggcgggcgccuuucgcuc

SEQ ID NO: 19334 - RNA, 22 nt, Artificial Sequence
  Synthetic
cggcggcgggcgccuuucgcuc

SEQ ID NO: 19335 - RNA, 23 nt, Artificial Sequence
  Synthetic
ucggcggcgggcgccuuucgcuc

SEQ ID NO: 19336 - RNA, 24 nt, Artificial Sequence
  Synthetic
gucggcggcgggcgccuuucgcuc

SEQ ID NO: 19337 - RNA, 18 nt, Artificial Sequence
  Synthetic
cgucccgauaaugggguc

SEQ ID NO: 19338 - RNA, 19 nt, Artificial Sequence
  Synthetic
ucgucccgauaaugggguc

SEQ ID NO: 19339 - RNA, 20 nt, Artificial Sequence
  Synthetic
gucgucccgauaaugggguc

SEQ ID NO: 19340 - RNA, 21 nt, Artificial Sequence
  Synthetic
ggucgucccgauaaugggguc

SEQ ID NO: 19341 - RNA, 22 nt, Artificial Sequence
  Synthetic
cggucgucccgauaaugggguc

SEQ ID NO: 19342 - RNA, 23 nt, Artificial Sequence
  Synthetic
gcggucgucccgauaaugggguc

SEQ ID NO: 19343 - RNA, 24 nt, Artificial Sequence
  Synthetic
cgcggucgucccgauaaugggguc

SEQ ID NO: 19344 - RNA, 18 nt, Artificial Sequence
  Synthetic
accgccgcgcgcucggag

SEQ ID NO: 19345 - RNA, 19 nt, Artificial Sequence
  Synthetic
gaccgccgcgcgcucggag

SEQ ID NO: 19346 - RNA, 20 nt, Artificial Sequence
  Synthetic
cgaccgccgcgcgcucggag

SEQ ID NO: 19347 - RNA, 21 nt, Artificial Sequence
  Synthetic
ucgaccgccgcgcgcucggag

SEQ ID NO: 19348 - RNA, 22 nt, Artificial Sequence
  Synthetic
gucgaccgccgcgcgcucggag

SEQ ID NO: 19349 - RNA, 23 nt, Artificial Sequence
  Synthetic
ggucgaccgccgcgcgcucggag

SEQ ID NO: 19350 - RNA, 24 nt, Artificial Sequence
  Synthetic
cggucgaccgccgcgcgcucggag

SEQ ID NO: 19351 - RNA, 18 nt, Artificial Sequence
  Synthetic
aaucgccagcgucauuag

SEQ ID NO: 19352 - RNA, 19 nt, Artificial Sequence
  Synthetic
caaucgccagcgucauuag

SEQ ID NO: 19353 - RNA, 21 nt, Artificial Sequence
  Synthetic
ggcaaucgccagcgucauuag

SEQ ID NO: 19354 - RNA, 22 nt, Artificial Sequence
  Synthetic
gggcaaucgccagcgucauuag

SEQ ID NO: 19355 - RNA, 23 nt, Artificial Sequence
  Synthetic
ggggcaaucgccagcgucauuag

SEQ ID NO: 19356 - RNA, 24 nt, Artificial Sequence
  Synthetic
gggggcaaucgccagcgucauuag

SEQ ID NO: 19357 - RNA, 18 nt, Artificial Sequence
  Synthetic
auuugccgugcacguacg

SEQ ID NO: 19358 - RNA, 19 nt, Artificial Sequence
  Synthetic
uauuugccgugcacguacg

SEQ ID NO: 19359 - RNA, 21 nt, Artificial Sequence
  Synthetic
aauauuugccgugcacguacg

SEQ ID NO: 19360 - RNA, 22 nt, Artificial Sequence
  Synthetic
aaauauuugccgugcacguacg

SEQ ID NO: 19361 - RNA, 23 nt, Artificial Sequence
  Synthetic
aaaauauuugccgugcacguacg

SEQ ID NO: 19362 - RNA, 24 nt, Artificial Sequence
  Synthetic
aaaaauauuugccgugcacguacg

SEQ ID NO: 19363 - RNA, 18 nt, Artificial Sequence
  Synthetic
cccgccaugcaggccccg

SEQ ID NO: 19364 - RNA, 19 nt, Artificial Sequence
  Synthetic
gcccgccaugcaggccccg

SEQ ID NO: 19365 - RNA, 21 nt, Artificial Sequence
  Synthetic
aggcccgccaugcaggccccg

SEQ ID NO: 19366 - RNA, 22 nt, Artificial Sequence
  Synthetic
caggcccgccaugcaggccccg

SEQ ID NO: 19367 - RNA, 23 nt, Artificial Sequence
  Synthetic
ucaggcccgccaugcaggccccg

SEQ ID NO: 19368 - RNA, 24 nt, Artificial Sequence
  Synthetic
aucaggcccgccaugcaggccccg

SEQ ID NO: 19369 - RNA, 18 nt, Artificial Sequence
  Synthetic
gcgcucggagauggagcg

SEQ ID NO: 19370 - RNA, 19 nt, Artificial Sequence
  Synthetic
cgcgcucggagauggagcg

SEQ ID NO: 19371 - RNA, 20 nt, Artificial Sequence
  Synthetic
gcgcgcucggagauggagcg

SEQ ID NO: 19372 - RNA, 21 nt, Artificial Sequence
  Synthetic
cgcgcgcucggagauggagcg

SEQ ID NO: 19373 - RNA, 22 nt, Artificial Sequence
  Synthetic
ccgcgcgcucggagauggagcg

SEQ ID NO: 19374 - RNA, 23 nt, Artificial Sequence
  Synthetic
gccgcgcgcucggagauggagcg

SEQ ID NO: 19375 - RNA, 24 nt, Artificial Sequence
  Synthetic
cgccgcgcgcucggagauggagcg

SEQ ID NO: 19376 - RNA, 18 nt, Artificial Sequence
  Synthetic
ucgccagcgucauuagcg

SEQ ID NO: 19377 - RNA, 19 nt, Artificial Sequence
  Synthetic
aucgccagcgucauuagcg

SEQ ID NO: 19378 - RNA, 21 nt, Artificial Sequence
  Synthetic
caaucgccagcgucauuagcg

SEQ ID NO: 19379 - RNA, 22 nt, Artificial Sequence
  Synthetic
gcaaucgccagcgucauuagcg

SEQ ID NO: 19380 - RNA, 23 nt, Artificial Sequence
  Synthetic
ggcaaucgccagcgucauuagcg

SEQ ID NO: 19381 - RNA, 24 nt, Artificial Sequence
  Synthetic
gggcaaucgccagcgucauuagcg

SEQ ID NO: 19382 - RNA, 18 nt, Artificial Sequence
  Synthetic
gcccaggggcuauucgcg

SEQ ID NO: 19383 - RNA, 19 nt, Artificial Sequence
  Synthetic
ggcccaggggcuauucgcg

SEQ ID NO: 19384 - RNA, 20 nt, Artificial Sequence
  Synthetic
gggcccaggggcuauucgcg

SEQ ID NO: 19385 - RNA, 21 nt, Artificial Sequence
  Synthetic
ggggcccaggggcuauucgcg

SEQ ID NO: 19386 - RNA, 22 nt, Artificial Sequence
  Synthetic
cggggcccaggggcuauucgcg

SEQ ID NO: 19387 - RNA, 23 nt, Artificial Sequence
  Synthetic
ccggggcccaggggcuauucgcg

SEQ ID NO: 19388 - RNA, 24 nt, Artificial Sequence
  Synthetic
accggggcccaggggcuauucgcg

SEQ ID NO: 19389 - RNA, 18 nt, Artificial Sequence
  Synthetic
gcgucgauggugucggcg

SEQ ID NO: 19390 - RNA, 19 nt, Artificial Sequence
  Synthetic
ggcgucgauggugucggcg

SEQ ID NO: 19391 - RNA, 20 nt, Artificial Sequence
  Synthetic
uggcgucgauggugucggcg

SEQ ID NO: 19392 - RNA, 21 nt, Artificial Sequence
  Synthetic
guggcgucgauggugucggcg

SEQ ID NO: 19393 - RNA, 22 nt, Artificial Sequence
  Synthetic
gguggcgucgauggugucggcg

SEQ ID NO: 19394 - RNA, 23 nt, Artificial Sequence
  Synthetic
ugguggcgucgauggugucggcg

SEQ ID NO: 19395 - RNA, 24 nt, Artificial Sequence
  Synthetic
gugguggcgucgauggugucggcg

SEQ ID NO: 19396 - RNA, 18 nt, Artificial Sequence
  Synthetic
cgcggggguccgcgggcg

SEQ ID NO: 19397 - RNA, 19 nt, Artificial Sequence
  Synthetic
gcgcggggguccgcgggcg

SEQ ID NO: 19398 - RNA, 21 nt, Artificial Sequence
  Synthetic
gggcgcggggguccgcgggcg

SEQ ID NO: 19399 - RNA, 22 nt, Artificial Sequence
  Synthetic
ggggcgcggggguccgcgggcg

SEQ ID NO: 19400 - RNA, 23 nt, Artificial Sequence
  Synthetic
cggggcgcggggguccgcgggcg

SEQ ID NO: 19401 - RNA, 24 nt, Artificial Sequence
  Synthetic
ccggggcgcggggguccgcgggcg

SEQ ID NO: 19402 - RNA, 18 nt, Artificial Sequence
  Synthetic
cgcuccggggccggggcg

SEQ ID NO: 19403 - RNA, 19 nt, Artificial Sequence
  Synthetic
ucgcuccggggccggggcg

SEQ ID NO: 19404 - RNA, 21 nt, Artificial Sequence
  Synthetic
uuucgcuccggggccggggcg

SEQ ID NO: 19405 - RNA, 22 nt, Artificial Sequence
  Synthetic
cuuucgcuccggggccggggcg

SEQ ID NO: 19406 - RNA, 23 nt, Artificial Sequence
  Synthetic
ccuuucgcuccggggccggggcg

SEQ ID NO: 19407 - RNA, 24 nt, Artificial Sequence
  Synthetic
gccuuucgcuccggggccggggcg

SEQ ID NO: 19408 - RNA, 18 nt, Artificial Sequence
  Synthetic
gccucgccauggggggcg

SEQ ID NO: 19409 - RNA, 19 nt, Artificial Sequence
  Synthetic
cgccucgccauggggggcg

SEQ ID NO: 19410 - RNA, 20 nt, Artificial Sequence
  Synthetic
acgccucgccauggggggcg

SEQ ID NO: 19411 - RNA, 21 nt, Artificial Sequence
  Synthetic
cacgccucgccauggggggcg

SEQ ID NO: 19412 - RNA, 22 nt, Artificial Sequence
  Synthetic
ccacgccucgccauggggggcg

SEQ ID NO: 19413 - RNA, 23 nt, Artificial Sequence
  Synthetic
gccacgccucgccauggggggcg

SEQ ID NO: 19414 - RNA, 24 nt, Artificial Sequence
  Synthetic
cgccacgccucgccauggggggcg

SEQ ID NO: 19415 - RNA, 18 nt, Artificial Sequence
  Synthetic
gcggaggccagcgccucg

SEQ ID NO: 19416 - RNA, 19 nt, Artificial Sequence
  Synthetic
ggcggaggccagcgccucg

SEQ ID NO: 19417 - RNA, 21 nt, Artificial Sequence
  Synthetic
ucggcggaggccagcgccucg

SEQ ID NO: 19418 - RNA, 22 nt, Artificial Sequence
  Synthetic
gucggcggaggccagcgccucg

SEQ ID NO: 19419 - RNA, 23 nt, Artificial Sequence
  Synthetic
cgucggcggaggccagcgccucg

SEQ ID NO: 19420 - RNA, 24 nt, Artificial Sequence
  Synthetic
ucgucggcggaggccagcgccucg

SEQ ID NO: 19421 - RNA, 18 nt, Artificial Sequence
  Synthetic
cacgccagcgucucgucg

SEQ ID NO: 19422 - RNA, 19 nt, Artificial Sequence
  Synthetic
ccacgccagcgucucgucg

SEQ ID NO: 19423 - RNA, 20 nt, Artificial Sequence
  Synthetic
accacgccagcgucucgucg

SEQ ID NO: 19424 - RNA, 21 nt, Artificial Sequence
  Synthetic
caccacgccagcgucucgucg

SEQ ID NO: 19425 - RNA, 22 nt, Artificial Sequence
  Synthetic
gcaccacgccagcgucucgucg

SEQ ID NO: 19426 - RNA, 23 nt, Artificial Sequence
  Synthetic
ugcaccacgccagcgucucgucg

SEQ ID NO: 19427 - RNA, 24 nt, Artificial Sequence
  Synthetic
uugcaccacgccagcgucucgucg

SEQ ID NO: 19428 - RNA, 18 nt, Artificial Sequence
  Synthetic
augcaggccccggggagg

SEQ ID NO: 19429 - RNA, 19 nt, Artificial Sequence
  Synthetic
caugcaggccccggggagg

SEQ ID NO: 19430 - RNA, 20 nt, Artificial Sequence
  Synthetic
ccaugcaggccccggggagg

SEQ ID NO: 19431 - RNA, 21 nt, Artificial Sequence
  Synthetic
gccaugcaggccccggggagg

SEQ ID NO: 19432 - RNA, 22 nt, Artificial Sequence
  Synthetic
cgccaugcaggccccggggagg

SEQ ID NO: 19433 - RNA, 23 nt, Artificial Sequence
  Synthetic
ccgccaugcaggccccggggagg

SEQ ID NO: 19434 - RNA, 24 nt, Artificial Sequence
  Synthetic
cccgccaugcaggccccggggagg

SEQ ID NO: 19435 - RNA, 18 nt, Artificial Sequence
  Synthetic
uuugccgugcacguacgg

SEQ ID NO: 19436 - RNA, 19 nt, Artificial Sequence
  Synthetic
auuugccgugcacguacgg

SEQ ID NO: 19437 - RNA, 21 nt, Artificial Sequence
  Synthetic
auauuugccgugcacguacgg

SEQ ID NO: 19438 - RNA, 22 nt, Artificial Sequence
  Synthetic
aauauuugccgugcacguacgg

SEQ ID NO: 19439 - RNA, 23 nt, Artificial Sequence
  Synthetic
aaauauuugccgugcacguacgg

SEQ ID NO: 19440 - RNA, 24 nt, Artificial Sequence
  Synthetic
aaaauauuugccgugcacguacgg

SEQ ID NO: 19441 - RNA, 18 nt, Artificial Sequence
  Synthetic
cgccagcgucauuagcgg

SEQ ID NO: 19442 - RNA, 19 nt, Artificial Sequence
  Synthetic
ucgccagcgucauuagcgg

SEQ ID NO: 19443 - RNA, 21 nt, Artificial Sequence
  Synthetic
aaucgccagcgucauuagcgg

SEQ ID NO: 19444 - RNA, 22 nt, Artificial Sequence
  Synthetic
caaucgccagcgucauuagcgg

SEQ ID NO: 19445 - RNA, 23 nt, Artificial Sequence
  Synthetic
gcaaucgccagcgucauuagcgg

SEQ ID NO: 19446 - RNA, 24 nt, Artificial Sequence
  Synthetic
ggcaaucgccagcgucauuagcgg

SEQ ID NO: 19447 - RNA, 18 nt, Artificial Sequence
  Synthetic
gggcgcggggguccgcgg

SEQ ID NO: 19448 - RNA, 19 nt, Artificial Sequence
  Synthetic
ggggcgcggggguccgcgg

SEQ ID NO: 19449 - RNA, 20 nt, Artificial Sequence
  Synthetic
cggggcgcggggguccgcgg

SEQ ID NO: 19450 - RNA, 21 nt, Artificial Sequence
  Synthetic
ccggggcgcggggguccgcgg

SEQ ID NO: 19451 - RNA, 22 nt, Artificial Sequence
  Synthetic
gccggggcgcggggguccgcgg

SEQ ID NO: 19452 - RNA, 23 nt, Artificial Sequence
  Synthetic
ggccggggcgcggggguccgcgg

SEQ ID NO: 19453 - RNA, 24 nt, Artificial Sequence
  Synthetic
gggccggggcgcggggguccgcgg

SEQ ID NO: 19454 - RNA, 18 nt, Artificial Sequence
  Synthetic
cccaggggcuauucgcgg

SEQ ID NO: 19455 - RNA, 19 nt, Artificial Sequence
  Synthetic
gcccaggggcuauucgcgg

SEQ ID NO: 19456 - RNA, 21 nt, Artificial Sequence
  Synthetic
gggcccaggggcuauucgcgg

SEQ ID NO: 19457 - RNA, 22 nt, Artificial Sequence
  Synthetic
ggggcccaggggcuauucgcgg

SEQ ID NO: 19458 - RNA, 23 nt, Artificial Sequence
  Synthetic
cggggcccaggggcuauucgcgg

SEQ ID NO: 19459 - RNA, 24 nt, Artificial Sequence
  Synthetic
ccggggcccaggggcuauucgcgg

SEQ ID NO: 19460 - RNA, 18 nt, Artificial Sequence
  Synthetic
gcggggguccgcgggcgg

SEQ ID NO: 19461 - RNA, 19 nt, Artificial Sequence
  Synthetic
cgcggggguccgcgggcgg

SEQ ID NO: 19462 - RNA, 21 nt, Artificial Sequence
  Synthetic
ggcgcggggguccgcgggcgg

SEQ ID NO: 19463 - RNA, 22 nt, Artificial Sequence
  Synthetic
gggcgcggggguccgcgggcgg

SEQ ID NO: 19464 - RNA, 23 nt, Artificial Sequence
  Synthetic
ggggcgcggggguccgcgggcgg

SEQ ID NO: 19465 - RNA, 24 nt, Artificial Sequence
  Synthetic
cggggcgcggggguccgcgggcgg

SEQ ID NO: 19466 - RNA, 18 nt, Artificial Sequence
  Synthetic
acgccagcgucucgucgg

SEQ ID NO: 19467 - RNA, 19 nt, Artificial Sequence
  Synthetic
cacgccagcgucucgucgg

SEQ ID NO: 19468 - RNA, 21 nt, Artificial Sequence
  Synthetic
accacgccagcgucucgucgg

SEQ ID NO: 19469 - RNA, 22 nt, Artificial Sequence
  Synthetic
caccacgccagcgucucgucgg

SEQ ID NO: 19470 - RNA, 23 nt, Artificial Sequence
  Synthetic
gcaccacgccagcgucucgucgg

SEQ ID NO: 19471 - RNA, 24 nt, Artificial Sequence
  Synthetic
ugcaccacgccagcgucucgucgg

SEQ ID NO: 19472 - RNA, 18 nt, Artificial Sequence
  Synthetic
cguccaccccgccccggg

SEQ ID NO: 19473 - RNA, 19 nt, Artificial Sequence
  Synthetic
ccguccaccccgccccggg

SEQ ID NO: 19474 - RNA, 20 nt, Artificial Sequence
  Synthetic
uccguccaccccgccccggg

SEQ ID NO: 19475 - RNA, 21 nt, Artificial Sequence
  Synthetic
guccguccaccccgccccggg

SEQ ID NO: 19476 - RNA, 22 nt, Artificial Sequence
  Synthetic
cguccguccaccccgccccggg

SEQ ID NO: 19477 - RNA, 23 nt, Artificial Sequence
  Synthetic
ccguccguccaccccgccccggg

SEQ ID NO: 19478 - RNA, 24 nt, Artificial Sequence
  Synthetic
gccguccguccaccccgccccggg

SEQ ID NO: 19479 - RNA, 18 nt, Artificial Sequence
  Synthetic
ggcgcggggguccgcggg

SEQ ID NO: 19480 - RNA, 19 nt, Artificial Sequence
  Synthetic
gggcgcggggguccgcggg

SEQ ID NO: 19481 - RNA, 21 nt, Artificial Sequence
  Synthetic
cggggcgcggggguccgcggg

SEQ ID NO: 19482 - RNA, 22 nt, Artificial Sequence
  Synthetic
ccggggcgcggggguccgcggg

SEQ ID NO: 19483 - RNA, 23 nt, Artificial Sequence
  Synthetic
gccggggcgcggggguccgcggg

SEQ ID NO: 19484 - RNA, 24 nt, Artificial Sequence
  Synthetic
ggccggggcgcggggguccgcggg

SEQ ID NO: 19485 - RNA, 18 nt, Artificial Sequence
  Synthetic
gcgccuuucgcuccgggg

SEQ ID NO: 19486 - RNA, 19 nt, Artificial Sequence
  Synthetic
ggcgccuuucgcuccgggg

SEQ ID NO: 19487 - RNA, 20 nt, Artificial Sequence
  Synthetic
gggcgccuuucgcuccgggg

SEQ ID NO: 19488 - RNA, 21 nt, Artificial Sequence
  Synthetic
cgggcgccuuucgcuccgggg

SEQ ID NO: 19489 - RNA, 22 nt, Artificial Sequence
  Synthetic
gcgggcgccuuucgcuccgggg

SEQ ID NO: 19490 - RNA, 23 nt, Artificial Sequence
  Synthetic
ggcgggcgccuuucgcuccgggg

SEQ ID NO: 19491 - RNA, 24 nt, Artificial Sequence
  Synthetic
cggcgggcgccuuucgcuccgggg

SEQ ID NO: 19492 - RNA, 18 nt, Artificial Sequence
  Synthetic
cgcuggccuccggguggg

SEQ ID NO: 19493 - RNA, 19 nt, Artificial Sequence
  Synthetic
ccgcuggccuccggguggg

SEQ ID NO: 19494 - RNA, 20 nt, Artificial Sequence
  Synthetic
uccgcuggccuccggguggg

SEQ ID NO: 19495 - RNA, 21 nt, Artificial Sequence
  Synthetic
guccgcuggccuccggguggg

SEQ ID NO: 19496 - RNA, 22 nt, Artificial Sequence
  Synthetic
uguccgcuggccuccggguggg

SEQ ID NO: 19497 - RNA, 23 nt, Artificial Sequence
  Synthetic
guguccgcuggccuccggguggg

SEQ ID NO: 19498 - RNA, 24 nt, Artificial Sequence
  Synthetic
cguguccgcuggccuccggguggg

SEQ ID NO: 19499 - RNA, 18 nt, Artificial Sequence
  Synthetic
gcgccacgccucgccaug

SEQ ID NO: 19500 - RNA, 19 nt, Artificial Sequence
  Synthetic
cgcgccacgccucgccaug

SEQ ID NO: 19501 - RNA, 21 nt, Artificial Sequence
  Synthetic
gccgcgccacgccucgccaug

SEQ ID NO: 19502 - RNA, 22 nt, Artificial Sequence
  Synthetic
ugccgcgccacgccucgccaug

SEQ ID NO: 19503 - RNA, 23 nt, Artificial Sequence
  Synthetic
cugccgcgccacgccucgccaug

SEQ ID NO: 19504 - RNA, 24 nt, Artificial Sequence
  Synthetic
acugccgcgccacgccucgccaug

SEQ ID NO: 19505 - RNA, 18 nt, Artificial Sequence
  Synthetic
cgccuucagguagcacug

SEQ ID NO: 19506 - RNA, 19 nt, Artificial Sequence
  Synthetic
gcgccuucagguagcacug

SEQ ID NO: 19507 - RNA, 20 nt, Artificial Sequence
  Synthetic
cgcgccuucagguagcacug

SEQ ID NO: 19508 - RNA, 21 nt, Artificial Sequence
  Synthetic
ucgcgccuucagguagcacug

SEQ ID NO: 19509 - RNA, 22 nt, Artificial Sequence
  Synthetic
cucgcgccuucagguagcacug

SEQ ID NO: 19510 - RNA, 23 nt, Artificial Sequence
  Synthetic
ccucgcgccuucagguagcacug

SEQ ID NO: 19511 - RNA, 24 nt, Artificial Sequence
  Synthetic
gccucgcgccuucagguagcacug

SEQ ID NO: 19512 - RNA, 18 nt, Artificial Sequence
  Synthetic
aagggccgcaggcgcgug

SEQ ID NO: 19513 - RNA, 19 nt, Artificial Sequence
  Synthetic
aaagggccgcaggcgcgug

SEQ ID NO: 19514 - RNA, 20 nt, Artificial Sequence
  Synthetic
gaaagggccgcaggcgcgug

SEQ ID NO: 19515 - RNA, 21 nt, Artificial Sequence
  Synthetic
agaaagggccgcaggcgcgug

SEQ ID NO: 19516 - RNA, 22 nt, Artificial Sequence
  Synthetic
gagaaagggccgcaggcgcgug

SEQ ID NO: 19517 - RNA, 23 nt, Artificial Sequence
  Synthetic
ggagaaagggccgcaggcgcgug

SEQ ID NO: 19518 - RNA, 24 nt, Artificial Sequence
  Synthetic
uggagaaagggccgcaggcgcgug

SEQ ID NO: 19519 - RNA, 18 nt, Artificial Sequence
  Synthetic
ccacgcucgacgcgguug

SEQ ID NO: 19520 - RNA, 19 nt, Artificial Sequence
  Synthetic
gccacgcucgacgcgguug

SEQ ID NO: 19521 - RNA, 20 nt, Artificial Sequence
  Synthetic
cgccacgcucgacgcgguug

SEQ ID NO: 19522 - RNA, 21 nt, Artificial Sequence
  Synthetic
acgccacgcucgacgcgguug

SEQ ID NO: 19523 - RNA, 22 nt, Artificial Sequence
  Synthetic
gacgccacgcucgacgcgguug

SEQ ID NO: 19524 - RNA, 23 nt, Artificial Sequence
  Synthetic
cgacgccacgcucgacgcgguug

SEQ ID NO: 19525 - RNA, 24 nt, Artificial Sequence
  Synthetic
gcgacgccacgcucgacgcgguug

SEQ ID NO: 19526 - RNA, 18 nt, Artificial Sequence
  Synthetic
cgcgccacgccucgccau

SEQ ID NO: 19527 - RNA, 19 nt, Artificial Sequence
  Synthetic
ccgcgccacgccucgccau

SEQ ID NO: 19528 - RNA, 21 nt, Artificial Sequence
  Synthetic
ugccgcgccacgccucgccau

SEQ ID NO: 19529 - RNA, 22 nt, Artificial Sequence
  Synthetic
cugccgcgccacgccucgccau

SEQ ID NO: 19530 - RNA, 23 nt, Artificial Sequence
  Synthetic
acugccgcgccacgccucgccau

SEQ ID NO: 19531 - RNA, 24 nt, Artificial Sequence
  Synthetic
cacugccgcgccacgccucgccau

SEQ ID NO: 19532 - RNA, 18 nt, Artificial Sequence
  Synthetic
ucccgauaaugggguccu

SEQ ID NO: 19533 - RNA, 19 nt, Artificial Sequence
  Synthetic
gucccgauaaugggguccu

SEQ ID NO: 19534 - RNA, 21 nt, Artificial Sequence
  Synthetic
ucgucccgauaaugggguccu

SEQ ID NO: 19535 - RNA, 22 nt, Artificial Sequence
  Synthetic
gucgucccgauaaugggguccu

SEQ ID NO: 19536 - RNA, 23 nt, Artificial Sequence
  Synthetic
ggucgucccgauaaugggguccu

SEQ ID NO: 19537 - RNA, 24 nt, Artificial Sequence
  Synthetic
cggucgucccgauaaugggguccu

SEQ ID NO: 19538 - RNA, 18 nt, Artificial Sequence
  Synthetic
ggucgaccgccgcgcgcu

SEQ ID NO: 19539 - RNA, 19 nt, Artificial Sequence
  Synthetic
cggucgaccgccgcgcgcu

SEQ ID NO: 19540 - RNA, 21 nt, Artificial Sequence
  Synthetic
ugcggucgaccgccgcgcgcu

SEQ ID NO: 19541 - RNA, 22 nt, Artificial Sequence
  Synthetic
augcggucgaccgccgcgcgcu

SEQ ID NO: 19542 - RNA, 23 nt, Artificial Sequence
  Synthetic
gaugcggucgaccgccgcgcgcu

SEQ ID NO: 19543 - RNA, 24 nt, Artificial Sequence
  Synthetic
ugaugcggucgaccgccgcgcgcu

SEQ ID NO: 19544 - RNA, 18 nt, Artificial Sequence
  Synthetic
cggcgggcgccuuucgcu

SEQ ID NO: 19545 - RNA, 19 nt, Artificial Sequence
  Synthetic
gcggcgggcgccuuucgcu

SEQ ID NO: 19546 - RNA, 20 nt, Artificial Sequence
  Synthetic
ggcggcgggcgccuuucgcu

SEQ ID NO: 19547 - RNA, 21 nt, Artificial Sequence
  Synthetic
cggcggcgggcgccuuucgcu

SEQ ID NO: 19548 - RNA, 22 nt, Artificial Sequence
  Synthetic
ucggcggcgggcgccuuucgcu

SEQ ID NO: 19549 - RNA, 23 nt, Artificial Sequence
  Synthetic
gucggcggcgggcgccuuucgcu

SEQ ID NO: 19550 - RNA, 24 nt, Artificial Sequence
  Synthetic
ugucggcggcgggcgccuuucgcu

SEQ ID NO: 19551 - RNA, 18 nt, Artificial Sequence
  Synthetic
aauauuugccgugcacgu

SEQ ID NO: 19552 - RNA, 19 nt, Artificial Sequence
  Synthetic
aaauauuugccgugcacgu

SEQ ID NO: 19553 - RNA, 20 nt, Artificial Sequence
  Synthetic
aaaauauuugccgugcacgu

SEQ ID NO: 19554 - RNA, 21 nt, Artificial Sequence
  Synthetic
aaaaauauuugccgugcacgu

SEQ ID NO: 19555 - RNA, 22 nt, Artificial Sequence
  Synthetic
uaaaaauauuugccgugcacgu

SEQ ID NO: 19556 - RNA, 23 nt, Artificial Sequence
  Synthetic
auaaaaauauuugccgugcacgu

SEQ ID NO: 19557 - RNA, 24 nt, Artificial Sequence
  Synthetic
aauaaaaauauuugccgugcacgu

SEQ ID NO: 19558 - RNA, 18 nt, Artificial Sequence
  Synthetic
cccggaggccagcggaca

SEQ ID NO: 19559 - RNA, 19 nt, Artificial Sequence
  Synthetic
acccggaggccagcggaca

SEQ ID NO: 19560 - RNA, 21 nt, Artificial Sequence
  Synthetic
ccacccggaggccagcggaca

SEQ ID NO: 19561 - RNA, 22 nt, Artificial Sequence
  Synthetic
cccacccggaggccagcggaca

SEQ ID NO: 19562 - RNA, 23 nt, Artificial Sequence
  Synthetic
acccacccggaggccagcggaca

SEQ ID NO: 19563 - RNA, 24 nt, Artificial Sequence
  Synthetic
gacccacccggaggccagcggaca

SEQ ID NO: 19564 - RNA, 18 nt, Artificial Sequence
  Synthetic
cgacccacccggaggcca

SEQ ID NO: 19565 - RNA, 19 nt, Artificial Sequence
  Synthetic
ccgacccacccggaggcca

SEQ ID NO: 19566 - RNA, 21 nt, Artificial Sequence
  Synthetic
gcccgacccacccggaggcca

SEQ ID NO: 19567 - RNA, 22 nt, Artificial Sequence
  Synthetic
agcccgacccacccggaggcca

SEQ ID NO: 19568 - RNA, 23 nt, Artificial Sequence
  Synthetic
cagcccgacccacccggaggcca

SEQ ID NO: 19569 - RNA, 24 nt, Artificial Sequence
  Synthetic
gcagcccgacccacccggaggcca

SEQ ID NO: 19570 - RNA, 18 nt, Artificial Sequence
  Synthetic
cccggugcuggcgggcca

SEQ ID NO: 19571 - RNA, 19 nt, Artificial Sequence
  Synthetic
ccccggugcuggcgggcca

SEQ ID NO: 19572 - RNA, 21 nt, Artificial Sequence
  Synthetic
ggccccggugcuggcgggcca

SEQ ID NO: 19573 - RNA, 22 nt, Artificial Sequence
  Synthetic
gggccccggugcuggcgggcca

SEQ ID NO: 19574 - RNA, 23 nt, Artificial Sequence
  Synthetic
ugggccccggugcuggcgggcca

SEQ ID NO: 19575 - RNA, 24 nt, Artificial Sequence
  Synthetic
cugggccccggugcuggcgggcca

SEQ ID NO: 19576 - RNA, 18 nt, Artificial Sequence
  Synthetic
gcgaggcguggcgcggca

SEQ ID NO: 19577 - RNA, 19 nt, Artificial Sequence
  Synthetic
ggcgaggcguggcgcggca

SEQ ID NO: 19578 - RNA, 21 nt, Artificial Sequence
  Synthetic
auggcgaggcguggcgcggca

SEQ ID NO: 19579 - RNA, 22 nt, Artificial Sequence
  Synthetic
cauggcgaggcguggcgcggca

SEQ ID NO: 19580 - RNA, 23 nt, Artificial Sequence
  Synthetic
ccauggcgaggcguggcgcggca

SEQ ID NO: 19581 - RNA, 24 nt, Artificial Sequence
  Synthetic
cccauggcgaggcguggcgcggca

SEQ ID NO: 19582 - RNA, 18 nt, Artificial Sequence
  Synthetic
cggcggucgaccgcauca

SEQ ID NO: 19583 - RNA, 19 nt, Artificial Sequence
  Synthetic
gcggcggucgaccgcauca

SEQ ID NO: 19584 - RNA, 21 nt, Artificial Sequence
  Synthetic
gcgcggcggucgaccgcauca

SEQ ID NO: 19585 - RNA, 22 nt, Artificial Sequence
  Synthetic
cgcgcggcggucgaccgcauca

SEQ ID NO: 19586 - RNA, 23 nt, Artificial Sequence
  Synthetic
gcgcgcggcggucgaccgcauca

SEQ ID NO: 19587 - RNA, 24 nt, Artificial Sequence
  Synthetic
agcgcgcggcggucgaccgcauca

SEQ ID NO: 19588 - RNA, 18 nt, Artificial Sequence
  Synthetic
ugcgccaagaaaauuuca

SEQ ID NO: 19589 - RNA, 19 nt, Artificial Sequence
  Synthetic
cugcgccaagaaaauuuca

SEQ ID NO: 19590 - RNA, 21 nt, Artificial Sequence
  Synthetic
ugcugcgccaagaaaauuuca

SEQ ID NO: 19591 - RNA, 22 nt, Artificial Sequence
  Synthetic
gugcugcgccaagaaaauuuca

SEQ ID NO: 19592 - RNA, 23 nt, Artificial Sequence
  Synthetic
cgugcugcgccaagaaaauuuca

SEQ ID NO: 19593 - RNA, 24 nt, Artificial Sequence
  Synthetic
gcgugcugcgccaagaaaauuuca

SEQ ID NO: 19594 - RNA, 18 nt, Artificial Sequence
  Synthetic
ccgcgccccggccccgga

SEQ ID NO: 19595 - RNA, 19 nt, Artificial Sequence
  Synthetic
cccgcgccccggccccgga

SEQ ID NO: 19596 - RNA, 21 nt, Artificial Sequence
  Synthetic
cccccgcgccccggccccgga

SEQ ID NO: 19597 - RNA, 22 nt, Artificial Sequence
  Synthetic
acccccgcgccccggccccgga

SEQ ID NO: 19598 - RNA, 23 nt, Artificial Sequence
  Synthetic
gacccccgcgccccggccccgga

SEQ ID NO: 19599 - RNA, 24 nt, Artificial Sequence
  Synthetic
ggacccccgcgccccggccccgga

SEQ ID NO: 19600 - RNA, 18 nt, Artificial Sequence
  Synthetic
cuuggugucggggucgga

SEQ ID NO: 19601 - RNA, 19 nt, Artificial Sequence
  Synthetic
ccuuggugucggggucgga

SEQ ID NO: 19602 - RNA, 21 nt, Artificial Sequence
  Synthetic
acccuuggugucggggucgga

SEQ ID NO: 19603 - RNA, 22 nt, Artificial Sequence
  Synthetic
gacccuuggugucggggucgga

SEQ ID NO: 19604 - RNA, 23 nt, Artificial Sequence
  Synthetic
cgacccuuggugucggggucgga

SEQ ID NO: 19605 - RNA, 24 nt, Artificial Sequence
  Synthetic
gcgacccuuggugucggggucgga

SEQ ID NO: 19606 - RNA, 18 nt, Artificial Sequence
  Synthetic
ccugcauggcgggccuga

SEQ ID NO: 19607 - RNA, 19 nt, Artificial Sequence
  Synthetic
gccugcauggcgggccuga

SEQ ID NO: 19608 - RNA, 21 nt, Artificial Sequence
  Synthetic
gggccugcauggcgggccuga

SEQ ID NO: 19609 - RNA, 22 nt, Artificial Sequence
  Synthetic
ggggccugcauggcgggccuga

SEQ ID NO: 19610 - RNA, 23 nt, Artificial Sequence
  Synthetic
cggggccugcauggcgggccuga

SEQ ID NO: 19611 - RNA, 24 nt, Artificial Sequence
  Synthetic
ccggggccugcauggcgggccuga

SEQ ID NO: 19612 - RNA, 18 nt, Artificial Sequence
  Synthetic
gcccccaggaccccauua

SEQ ID NO: 19613 - RNA, 19 nt, Artificial Sequence
  Synthetic
cgcccccaggaccccauua

SEQ ID NO: 19614 - RNA, 21 nt, Artificial Sequence
  Synthetic
ugcgcccccaggaccccauua

SEQ ID NO: 19615 - RNA, 22 nt, Artificial Sequence
  Synthetic
cugcgcccccaggaccccauua

SEQ ID NO: 19616 - RNA, 23 nt, Artificial Sequence
  Synthetic
gcugcgcccccaggaccccauua

SEQ ID NO: 19617 - RNA, 24 nt, Artificial Sequence
  Synthetic
cgcugcgcccccaggaccccauua

SEQ ID NO: 19618 - RNA, 18 nt, Artificial Sequence
  Synthetic
gugagcagcccgacccac

SEQ ID NO: 19619 - RNA, 19 nt, Artificial Sequence
  Synthetic
agugagcagcccgacccac

SEQ ID NO: 19620 - RNA, 21 nt, Artificial Sequence
  Synthetic
gcagugagcagcccgacccac

SEQ ID NO: 19621 - RNA, 22 nt, Artificial Sequence
  Synthetic
ggcagugagcagcccgacccac

SEQ ID NO: 19622 - RNA, 23 nt, Artificial Sequence
  Synthetic
cggcagugagcagcccgacccac

SEQ ID NO: 19623 - RNA, 24 nt, Artificial Sequence
  Synthetic
gcggcagugagcagcccgacccac

SEQ ID NO: 19624 - RNA, 18 nt, Artificial Sequence
  Synthetic
acccggaggccagcggac

SEQ ID NO: 19625 - RNA, 19 nt, Artificial Sequence
  Synthetic
cacccggaggccagcggac

SEQ ID NO: 19626 - RNA, 21 nt, Artificial Sequence
  Synthetic
cccacccggaggccagcggac

SEQ ID NO: 19627 - RNA, 22 nt, Artificial Sequence
  Synthetic
acccacccggaggccagcggac

SEQ ID NO: 19628 - RNA, 23 nt, Artificial Sequence
  Synthetic
gacccacccggaggccagcggac

SEQ ID NO: 19629 - RNA, 24 nt, Artificial Sequence
  Synthetic
cgacccacccggaggccagcggac

SEQ ID NO: 19630 - RNA, 18 nt, Artificial Sequence
  Synthetic
cccuuucuccagugcuac

SEQ ID NO: 19631 - RNA, 19 nt, Artificial Sequence
  Synthetic
gcccuuucuccagugcuac

SEQ ID NO: 19632 - RNA, 21 nt, Artificial Sequence
  Synthetic
cggcccuuucuccagugcuac

SEQ ID NO: 19633 - RNA, 22 nt, Artificial Sequence
  Synthetic
gcggcccuuucuccagugcuac

SEQ ID NO: 19634 - RNA, 23 nt, Artificial Sequence
  Synthetic
ugcggcccuuucuccagugcuac

SEQ ID NO: 19635 - RNA, 24 nt, Artificial Sequence
  Synthetic
cugcggcccuuucuccagugcuac

SEQ ID NO: 19636 - RNA, 18 nt, Artificial Sequence
  Synthetic
ugagcagcccgacccacc

SEQ ID NO: 19637 - RNA, 19 nt, Artificial Sequence
  Synthetic
gugagcagcccgacccacc

SEQ ID NO: 19638 - RNA, 21 nt, Artificial Sequence
  Synthetic
cagugagcagcccgacccacc

SEQ ID NO: 19639 - RNA, 22 nt, Artificial Sequence
  Synthetic
gcagugagcagcccgacccacc

SEQ ID NO: 19640 - RNA, 23 nt, Artificial Sequence
  Synthetic
ggcagugagcagcccgacccacc

SEQ ID NO: 19641 - RNA, 24 nt, Artificial Sequence
  Synthetic
cggcagugagcagcccgacccacc

SEQ ID NO: 19642 - RNA, 18 nt, Artificial Sequence
  Synthetic
aaccugccgcugcgcccc

SEQ ID NO: 19643 - RNA, 19 nt, Artificial Sequence
  Synthetic
caaccugccgcugcgcccc

SEQ ID NO: 19644 - RNA, 21 nt, Artificial Sequence
  Synthetic
cacaaccugccgcugcgcccc

SEQ ID NO: 19645 - RNA, 22 nt, Artificial Sequence
  Synthetic
ccacaaccugccgcugcgcccc

SEQ ID NO: 19646 - RNA, 23 nt, Artificial Sequence
  Synthetic
accacaaccugccgcugcgcccc

SEQ ID NO: 19647 - RNA, 24 nt, Artificial Sequence
  Synthetic
caccacaaccugccgcugcgcccc

SEQ ID NO: 19648 - RNA, 18 nt, Artificial Sequence
  Synthetic
ucccgccgcgaauagccc

SEQ ID NO: 19649 - RNA, 19 nt, Artificial Sequence
  Synthetic
uucccgccgcgaauagccc

SEQ ID NO: 19650 - RNA, 21 nt, Artificial Sequence
  Synthetic
guuucccgccgcgaauagccc

SEQ ID NO: 19651 - RNA, 22 nt, Artificial Sequence
  Synthetic
cguuucccgccgcgaauagccc

SEQ ID NO: 19652 - RNA, 23 nt, Artificial Sequence
  Synthetic
ccguuucccgccgcgaauagccc

SEQ ID NO: 19653 - RNA, 24 nt, Artificial Sequence
  Synthetic
gccguuucccgccgcgaauagccc

SEQ ID NO: 19654 - RNA, 18 nt, Artificial Sequence
  Synthetic
cccugggggaccccgccc

SEQ ID NO: 19655 - RNA, 19 nt, Artificial Sequence
  Synthetic
acccugggggaccccgccc

SEQ ID NO: 19656 - RNA, 21 nt, Artificial Sequence
  Synthetic
caacccugggggaccccgccc

SEQ ID NO: 19657 - RNA, 22 nt, Artificial Sequence
  Synthetic
gcaacccugggggaccccgccc

SEQ ID NO: 19658 - RNA, 23 nt, Artificial Sequence
  Synthetic
cgcaacccugggggaccccgccc

SEQ ID NO: 19659 - RNA, 24 nt, Artificial Sequence
  Synthetic
ucgcaacccugggggaccccgccc

SEQ ID NO: 19660 - RNA, 18 nt, Artificial Sequence
  Synthetic
gcgauugcccccccgccc

SEQ ID NO: 19661 - RNA, 19 nt, Artificial Sequence
  Synthetic
ggcgauugcccccccgccc

SEQ ID NO: 19662 - RNA, 21 nt, Artificial Sequence
  Synthetic
cuggcgauugcccccccgccc

SEQ ID NO: 19663 - RNA, 22 nt, Artificial Sequence
  Synthetic
gcuggcgauugcccccccgccc

SEQ ID NO: 19664 - RNA, 23 nt, Artificial Sequence
  Synthetic
cgcuggcgauugcccccccgccc

SEQ ID NO: 19665 - RNA, 24 nt, Artificial Sequence
  Synthetic
acgcuggcgauugcccccccgccc

SEQ ID NO: 19666 - RNA, 18 nt, Artificial Sequence
  Synthetic
acccccgcgccccggccc

SEQ ID NO: 19667 - RNA, 19 nt, Artificial Sequence
  Synthetic
gacccccgcgccccggccc

SEQ ID NO: 19668 - RNA, 21 nt, Artificial Sequence
  Synthetic
cggacccccgcgccccggccc

SEQ ID NO: 19669 - RNA, 22 nt, Artificial Sequence
  Synthetic
gcggacccccgcgccccggccc

SEQ ID NO: 19670 - RNA, 23 nt, Artificial Sequence
  Synthetic
cgcggacccccgcgccccggccc

SEQ ID NO: 19671 - RNA, 24 nt, Artificial Sequence
  Synthetic
ccgcggacccccgcgccccggccc

SEQ ID NO: 19672 - RNA, 18 nt, Artificial Sequence
  Synthetic
gaugcauuucuaccuccc

SEQ ID NO: 19673 - RNA, 19 nt, Artificial Sequence
  Synthetic
agaugcauuucuaccuccc

SEQ ID NO: 19674 - RNA, 21 nt, Artificial Sequence
  Synthetic
gaagaugcauuucuaccuccc

SEQ ID NO: 19675 - RNA, 22 nt, Artificial Sequence
  Synthetic
agaagaugcauuucuaccuccc

SEQ ID NO: 19676 - RNA, 23 nt, Artificial Sequence
  Synthetic
gagaagaugcauuucuaccuccc

SEQ ID NO: 19677 - RNA, 24 nt, Artificial Sequence
  Synthetic
agagaagaugcauuucuaccuccc

SEQ ID NO: 19678 - RNA, 18 nt, Artificial Sequence
  Synthetic
acccugggggaccccgcc

SEQ ID NO: 19679 - RNA, 19 nt, Artificial Sequence
  Synthetic
aacccugggggaccccgcc

SEQ ID NO: 19680 - RNA, 21 nt, Artificial Sequence
  Synthetic
gcaacccugggggaccccgcc

SEQ ID NO: 19681 - RNA, 22 nt, Artificial Sequence
  Synthetic
cgcaacccugggggaccccgcc

SEQ ID NO: 19682 - RNA, 23 nt, Artificial Sequence
  Synthetic
ucgcaacccugggggaccccgcc

SEQ ID NO: 19683 - RNA, 24 nt, Artificial Sequence
  Synthetic
aucgcaacccugggggaccccgcc

SEQ ID NO: 19684 - RNA, 18 nt, Artificial Sequence
  Synthetic
gcgacugcgugcugcgcc

SEQ ID NO: 19685 - RNA, 19 nt, Artificial Sequence
  Synthetic
cgcgacugcgugcugcgcc

SEQ ID NO: 19686 - RNA, 21 nt, Artificial Sequence
  Synthetic
ugcgcgacugcgugcugcgcc

SEQ ID NO: 19687 - RNA, 22 nt, Artificial Sequence
  Synthetic
augcgcgacugcgugcugcgcc

SEQ ID NO: 19688 - RNA, 23 nt, Artificial Sequence
  Synthetic
caugcgcgacugcgugcugcgcc

SEQ ID NO: 19689 - RNA, 24 nt, Artificial Sequence
  Synthetic
ccaugcgcgacugcgugcugcgcc

SEQ ID NO: 19690 - RNA, 18 nt, Artificial Sequence
  Synthetic
gacccccgcgccccggcc

SEQ ID NO: 19691 - RNA, 19 nt, Artificial Sequence
  Synthetic
ggacccccgcgccccggcc

SEQ ID NO: 19692 - RNA, 21 nt, Artificial Sequence
  Synthetic
gcggacccccgcgccccggcc

SEQ ID NO: 19693 - RNA, 22 nt, Artificial Sequence
  Synthetic
cgcggacccccgcgccccggcc

SEQ ID NO: 19694 - RNA, 23 nt, Artificial Sequence
  Synthetic
ccgcggacccccgcgccccggcc

SEQ ID NO: 19695 - RNA, 24 nt, Artificial Sequence
  Synthetic
cccgcggacccccgcgccccggcc

SEQ ID NO: 19696 - RNA, 18 nt, Artificial Sequence
  Synthetic
ccccggugcuggcgggcc

SEQ ID NO: 19697 - RNA, 19 nt, Artificial Sequence
  Synthetic
gccccggugcuggcgggcc

SEQ ID NO: 19698 - RNA, 21 nt, Artificial Sequence
  Synthetic
gggccccggugcuggcgggcc

SEQ ID NO: 19699 - RNA, 22 nt, Artificial Sequence
  Synthetic
ugggccccggugcuggcgggcc

SEQ ID NO: 19700 - RNA, 23 nt, Artificial Sequence
  Synthetic
cugggccccggugcuggcgggcc

SEQ ID NO: 19701 - RNA, 24 nt, Artificial Sequence
  Synthetic
ccugggccccggugcuggcgggcc

SEQ ID NO: 19702 - RNA, 18 nt, Artificial Sequence
  Synthetic
cacuuuugccggcaaucc

SEQ ID NO: 19703 - RNA, 19 nt, Artificial Sequence
  Synthetic
gcacuuuugccggcaaucc

SEQ ID NO: 19704 - RNA, 21 nt, Artificial Sequence
  Synthetic
ucgcacuuuugccggcaaucc

SEQ ID NO: 19705 - RNA, 22 nt, Artificial Sequence
  Synthetic
aucgcacuuuugccggcaaucc

SEQ ID NO: 19706 - RNA, 23 nt, Artificial Sequence
  Synthetic
uaucgcacuuuugccggcaaucc

SEQ ID NO: 19707 - RNA, 24 nt, Artificial Sequence
  Synthetic
cuaucgcacuuuugccggcaaucc

SEQ ID NO: 19708 - RNA, 18 nt, Artificial Sequence
  Synthetic
agaugcauuucuaccucc

SEQ ID NO: 19709 - RNA, 19 nt, Artificial Sequence
  Synthetic
aagaugcauuucuaccucc

SEQ ID NO: 19710 - RNA, 21 nt, Artificial Sequence
  Synthetic
agaagaugcauuucuaccucc

SEQ ID NO: 19711 - RNA, 22 nt, Artificial Sequence
  Synthetic
gagaagaugcauuucuaccucc

SEQ ID NO: 19712 - RNA, 23 nt, Artificial Sequence
  Synthetic
agagaagaugcauuucuaccucc

SEQ ID NO: 19713 - RNA, 24 nt, Artificial Sequence
  Synthetic
gagagaagaugcauuucuaccucc

SEQ ID NO: 19714 - RNA, 18 nt, Artificial Sequence
  Synthetic
gagaccagacgggucucc

SEQ ID NO: 19715 - RNA, 19 nt, Artificial Sequence
  Synthetic
cgagaccagacgggucucc

SEQ ID NO: 19716 - RNA, 21 nt, Artificial Sequence
  Synthetic
gccgagaccagacgggucucc

SEQ ID NO: 19717 - RNA, 22 nt, Artificial Sequence
  Synthetic
cgccgagaccagacgggucucc

SEQ ID NO: 19718 - RNA, 23 nt, Artificial Sequence
  Synthetic
acgccgagaccagacgggucucc

SEQ ID NO: 19719 - RNA, 24 nt, Artificial Sequence
  Synthetic
gacgccgagaccagacgggucucc

SEQ ID NO: 19720 - RNA, 18 nt, Artificial Sequence
  Synthetic
gcggucgaccgcaucagc

SEQ ID NO: 19721 - RNA, 19 nt, Artificial Sequence
  Synthetic
ggcggucgaccgcaucagc

SEQ ID NO: 19722 - RNA, 21 nt, Artificial Sequence
  Synthetic
gcggcggucgaccgcaucagc

SEQ ID NO: 19723 - RNA, 22 nt, Artificial Sequence
  Synthetic
cgcggcggucgaccgcaucagc

SEQ ID NO: 19724 - RNA, 23 nt, Artificial Sequence
  Synthetic
gcgcggcggucgaccgcaucagc

SEQ ID NO: 19725 - RNA, 24 nt, Artificial Sequence
  Synthetic
cgcgcggcggucgaccgcaucagc

SEQ ID NO: 19726 - RNA, 18 nt, Artificial Sequence
  Synthetic
auccuagacacgcaccgc

SEQ ID NO: 19727 - RNA, 19 nt, Artificial Sequence
  Synthetic
aauccuagacacgcaccgc

SEQ ID NO: 19728 - RNA, 21 nt, Artificial Sequence
  Synthetic
gaaauccuagacacgcaccgc

SEQ ID NO: 19729 - RNA, 22 nt, Artificial Sequence
  Synthetic
cgaaauccuagacacgcaccgc

SEQ ID NO: 19730 - RNA, 23 nt, Artificial Sequence
  Synthetic
ucgaaauccuagacacgcaccgc

SEQ ID NO: 19731 - RNA, 24 nt, Artificial Sequence
  Synthetic
aucgaaauccuagacacgcaccgc

SEQ ID NO: 19732 - RNA, 18 nt, Artificial Sequence
  Synthetic
ccagugcuaccugaaggc

SEQ ID NO: 19733 - RNA, 19 nt, Artificial Sequence
  Synthetic
uccagugcuaccugaaggc

SEQ ID NO: 19734 - RNA, 21 nt, Artificial Sequence
  Synthetic
ucuccagugcuaccugaaggc

SEQ ID NO: 19735 - RNA, 22 nt, Artificial Sequence
  Synthetic
uucuccagugcuaccugaaggc

SEQ ID NO: 19736 - RNA, 23 nt, Artificial Sequence
  Synthetic
uuucuccagugcuaccugaaggc

SEQ ID NO: 19737 - RNA, 24 nt, Artificial Sequence
  Synthetic
cuuucuccagugcuaccugaaggc

SEQ ID NO: 19738 - RNA, 18 nt, Artificial Sequence
  Synthetic
accuuggucgcccacggc

SEQ ID NO: 19739 - RNA, 19 nt, Artificial Sequence
  Synthetic
aaccuuggucgcccacggc

SEQ ID NO: 19740 - RNA, 21 nt, Artificial Sequence
  Synthetic
gaaaccuuggucgcccacggc

SEQ ID NO: 19741 - RNA, 22 nt, Artificial Sequence
  Synthetic
ggaaaccuuggucgcccacggc

SEQ ID NO: 19742 - RNA, 23 nt, Artificial Sequence
  Synthetic
gggaaaccuuggucgcccacggc

SEQ ID NO: 19743 - RNA, 24 nt, Artificial Sequence
  Synthetic
ugggaaaccuuggucgcccacggc

SEQ ID NO: 19744 - RNA, 18 nt, Artificial Sequence
  Synthetic
gcgcgaggccugugcggc

SEQ ID NO: 19745 - RNA, 19 nt, Artificial Sequence
  Synthetic
ggcgcgaggccugugcggc

SEQ ID NO: 19746 - RNA, 21 nt, Artificial Sequence
  Synthetic
aaggcgcgaggccugugcggc

SEQ ID NO: 19747 - RNA, 22 nt, Artificial Sequence
  Synthetic
gaaggcgcgaggccugugcggc

SEQ ID NO: 19748 - RNA, 23 nt, Artificial Sequence
  Synthetic
ugaaggcgcgaggccugugcggc

SEQ ID NO: 19749 - RNA, 24 nt, Artificial Sequence
  Synthetic
cugaaggcgcgaggccugugcggc

SEQ ID NO: 19750 - RNA, 18 nt, Artificial Sequence
  Synthetic
cgagaccagacgggucuc

SEQ ID NO: 19751 - RNA, 19 nt, Artificial Sequence
  Synthetic
ccgagaccagacgggucuc

SEQ ID NO: 19752 - RNA, 21 nt, Artificial Sequence
  Synthetic
cgccgagaccagacgggucuc

SEQ ID NO: 19753 - RNA, 22 nt, Artificial Sequence
  Synthetic
acgccgagaccagacgggucuc

SEQ ID NO: 19754 - RNA, 23 nt, Artificial Sequence
  Synthetic
gacgccgagaccagacgggucuc

SEQ ID NO: 19755 - RNA, 24 nt, Artificial Sequence
  Synthetic
ugacgccgagaccagacgggucuc

SEQ ID NO: 19756 - RNA, 18 nt, Artificial Sequence
  Synthetic
cgcgucgagcguggcguc

SEQ ID NO: 19757 - RNA, 19 nt, Artificial Sequence
  Synthetic
ccgcgucgagcguggcguc

SEQ ID NO: 19758 - RNA, 21 nt, Artificial Sequence
  Synthetic
aaccgcgucgagcguggcguc

SEQ ID NO: 19759 - RNA, 22 nt, Artificial Sequence
  Synthetic
caaccgcgucgagcguggcguc

SEQ ID NO: 19760 - RNA, 23 nt, Artificial Sequence
  Synthetic
ccaaccgcgucgagcguggcguc

SEQ ID NO: 19761 - RNA, 24 nt, Artificial Sequence
  Synthetic
gccaaccgcgucgagcguggcguc

SEQ ID NO: 19762 - RNA, 18 nt, Artificial Sequence
  Synthetic
cggugcuggcgggccaag

SEQ ID NO: 19763 - RNA, 19 nt, Artificial Sequence
  Synthetic
ccggugcuggcgggccaag

SEQ ID NO: 19764 - RNA, 21 nt, Artificial Sequence
  Synthetic
ccccggugcuggcgggccaag

SEQ ID NO: 19765 - RNA, 22 nt, Artificial Sequence
  Synthetic
gccccggugcuggcgggccaag

SEQ ID NO: 19766 - RNA, 23 nt, Artificial Sequence
  Synthetic
ggccccggugcuggcgggccaag

SEQ ID NO: 19767 - RNA, 24 nt, Artificial Sequence
  Synthetic
gggccccggugcuggcgggccaag

SEQ ID NO: 19768 - RNA, 18 nt, Artificial Sequence
  Synthetic
aaggagggcccuuugacg

SEQ ID NO: 19769 - RNA, 19 nt, Artificial Sequence
  Synthetic
caaggagggcccuuugacg

SEQ ID NO: 19770 - RNA, 21 nt, Artificial Sequence
  Synthetic
gccaaggagggcccuuugacg

SEQ ID NO: 19771 - RNA, 22 nt, Artificial Sequence
  Synthetic
ggccaaggagggcccuuugacg

SEQ ID NO: 19772 - RNA, 23 nt, Artificial Sequence
  Synthetic
gggccaaggagggcccuuugacg

SEQ ID NO: 19773 - RNA, 24 nt, Artificial Sequence
  Synthetic
cgggccaaggagggcccuuugacg

SEQ ID NO: 19774 - RNA, 18 nt, Artificial Sequence
  Synthetic
aggcgcuggccuccgccg

SEQ ID NO: 19775 - RNA, 19 nt, Artificial Sequence
  Synthetic
gaggcgcuggccuccgccg

SEQ ID NO: 19776 - RNA, 21 nt, Artificial Sequence
  Synthetic
ucgaggcgcuggccuccgccg

SEQ ID NO: 19777 - RNA, 22 nt, Artificial Sequence
  Synthetic
aucgaggcgcuggccuccgccg

SEQ ID NO: 19778 - RNA, 23 nt, Artificial Sequence
  Synthetic
caucgaggcgcuggccuccgccg

SEQ ID NO: 19779 - RNA, 24 nt, Artificial Sequence
  Synthetic
ucaucgaggcgcuggccuccgccg

SEQ ID NO: 19780 - RNA, 18 nt, Artificial Sequence
  Synthetic
ccaggcucgccaaccgcg

SEQ ID NO: 19781 - RNA, 19 nt, Artificial Sequence
  Synthetic
gccaggcucgccaaccgcg

SEQ ID NO: 19782 - RNA, 21 nt, Artificial Sequence
  Synthetic
uggccaggcucgccaaccgcg

SEQ ID NO: 19783 - RNA, 22 nt, Artificial Sequence
  Synthetic
cuggccaggcucgccaaccgcg

SEQ ID NO: 19784 - RNA, 23 nt, Artificial Sequence
  Synthetic
ucuggccaggcucgccaaccgcg

SEQ ID NO: 19785 - RNA, 24 nt, Artificial Sequence
  Synthetic
uucuggccaggcucgccaaccgcg

SEQ ID NO: 19786 - RNA, 18 nt, Artificial Sequence
  Synthetic
gcgucgagcguggcgucg

SEQ ID NO: 19787 - RNA, 19 nt, Artificial Sequence
  Synthetic
cgcgucgagcguggcgucg

SEQ ID NO: 19788 - RNA, 21 nt, Artificial Sequence
  Synthetic
accgcgucgagcguggcgucg

SEQ ID NO: 19789 - RNA, 22 nt, Artificial Sequence
  Synthetic
aaccgcgucgagcguggcgucg

SEQ ID NO: 19790 - RNA, 23 nt, Artificial Sequence
  Synthetic
caaccgcgucgagcguggcgucg

SEQ ID NO: 19791 - RNA, 24 nt, Artificial Sequence
  Synthetic
ccaaccgcgucgagcguggcgucg

SEQ ID NO: 19792 - RNA, 18 nt, Artificial Sequence
  Synthetic
cccuuggugucggggucg

SEQ ID NO: 19793 - RNA, 19 nt, Artificial Sequence
  Synthetic
acccuuggugucggggucg

SEQ ID NO: 19794 - RNA, 21 nt, Artificial Sequence
  Synthetic
cgacccuuggugucggggucg

SEQ ID NO: 19795 - RNA, 22 nt, Artificial Sequence
  Synthetic
gcgacccuuggugucggggucg

SEQ ID NO: 19796 - RNA, 23 nt, Artificial Sequence
  Synthetic
cgcgacccuuggugucggggucg

SEQ ID NO: 19797 - RNA, 24 nt, Artificial Sequence
  Synthetic
acgcgacccuuggugucggggucg

SEQ ID NO: 19798 - RNA, 18 nt, Artificial Sequence
  Synthetic
gggggaccccgccccggg

SEQ ID NO: 19799 - RNA, 19 nt, Artificial Sequence
  Synthetic
ugggggaccccgccccggg

SEQ ID NO: 19800 - RNA, 21 nt, Artificial Sequence
  Synthetic
ccugggggaccccgccccggg

SEQ ID NO: 19801 - RNA, 22 nt, Artificial Sequence
  Synthetic
cccugggggaccccgccccggg

SEQ ID NO: 19802 - RNA, 23 nt, Artificial Sequence
  Synthetic
acccugggggaccccgccccggg

SEQ ID NO: 19803 - RNA, 24 nt, Artificial Sequence
  Synthetic
aacccugggggaccccgccccggg

SEQ ID NO: 19804 - RNA, 18 nt, Artificial Sequence
  Synthetic
accccgccccggggcggg

SEQ ID NO: 19805 - RNA, 19 nt, Artificial Sequence
  Synthetic
gaccccgccccggggcggg

SEQ ID NO: 19806 - RNA, 21 nt, Artificial Sequence
  Synthetic
gggaccccgccccggggcggg

SEQ ID NO: 19807 - RNA, 22 nt, Artificial Sequence
  Synthetic
ggggaccccgccccggggcggg

SEQ ID NO: 19808 - RNA, 23 nt, Artificial Sequence
  Synthetic
gggggaccccgccccggggcggg

SEQ ID NO: 19809 - RNA, 24 nt, Artificial Sequence
  Synthetic
ugggggaccccgccccggggcggg

SEQ ID NO: 19810 - RNA, 18 nt, Artificial Sequence
  Synthetic
cgacccuuggugucgggg

SEQ ID NO: 19811 - RNA, 19 nt, Artificial Sequence
  Synthetic
gcgacccuuggugucgggg

SEQ ID NO: 19812 - RNA, 21 nt, Artificial Sequence
  Synthetic
acgcgacccuuggugucgggg

SEQ ID NO: 19813 - RNA, 22 nt, Artificial Sequence
  Synthetic
uacgcgacccuuggugucgggg

SEQ ID NO: 19814 - RNA, 23 nt, Artificial Sequence
  Synthetic
cuacgcgacccuuggugucgggg

SEQ ID NO: 19815 - RNA, 24 nt, Artificial Sequence
  Synthetic
acuacgcgacccuuggugucgggg

SEQ ID NO: 19816 - RNA, 18 nt, Artificial Sequence
  Synthetic
gaggccugugcggccugg

SEQ ID NO: 19817 - RNA, 19 nt, Artificial Sequence
  Synthetic
cgaggccugugcggccugg

SEQ ID NO: 19818 - RNA, 21 nt, Artificial Sequence
  Synthetic
cgcgaggccugugcggccugg

SEQ ID NO: 19819 - RNA, 22 nt, Artificial Sequence
  Synthetic
gcgcgaggccugugcggccugg

SEQ ID NO: 19820 - RNA, 23 nt, Artificial Sequence
  Synthetic
ggcgcgaggccugugcggccugg

SEQ ID NO: 19821 - RNA, 24 nt, Artificial Sequence
  Synthetic
aggcgcgaggccugugcggccugg

SEQ ID NO: 19822 - RNA, 18 nt, Artificial Sequence
  Synthetic
cgccccggggcggggugg

SEQ ID NO: 19823 - RNA, 19 nt, Artificial Sequence
  Synthetic
ccgccccggggcggggugg

SEQ ID NO: 19824 - RNA, 21 nt, Artificial Sequence
  Synthetic
ccccgccccggggcggggugg

SEQ ID NO: 19825 - RNA, 22 nt, Artificial Sequence
  Synthetic
accccgccccggggcggggugg

SEQ ID NO: 19826 - RNA, 23 nt, Artificial Sequence
  Synthetic
gaccccgccccggggcggggugg

SEQ ID NO: 19827 - RNA, 24 nt, Artificial Sequence
  Synthetic
ggaccccgccccggggcggggugg

SEQ ID NO: 19828 - RNA, 18 nt, Artificial Sequence
  Synthetic
gccccggcgccccccaug

SEQ ID NO: 19829 - RNA, 19 nt, Artificial Sequence
  Synthetic
ggccccggcgccccccaug

SEQ ID NO: 19830 - RNA, 21 nt, Artificial Sequence
  Synthetic
acggccccggcgccccccaug

SEQ ID NO: 19831 - RNA, 22 nt, Artificial Sequence
  Synthetic
gacggccccggcgccccccaug

SEQ ID NO: 19832 - RNA, 23 nt, Artificial Sequence
  Synthetic
ggacggccccggcgccccccaug

SEQ ID NO: 19833 - RNA, 24 nt, Artificial Sequence
  Synthetic
cggacggccccggcgccccccaug

SEQ ID NO: 19834 - RNA, 18 nt, Artificial Sequence
  Synthetic
cuccccggggccugcaug

SEQ ID NO: 19835 - RNA, 19 nt, Artificial Sequence
  Synthetic
ccuccccggggccugcaug

SEQ ID NO: 19836 - RNA, 21 nt, Artificial Sequence
  Synthetic
uaccuccccggggccugcaug

SEQ ID NO: 19837 - RNA, 22 nt, Artificial Sequence
  Synthetic
cuaccuccccggggccugcaug

SEQ ID NO: 19838 - RNA, 23 nt, Artificial Sequence
  Synthetic
ucuaccuccccggggccugcaug

SEQ ID NO: 19839 - RNA, 24 nt, Artificial Sequence
  Synthetic
uucuaccuccccggggccugcaug

SEQ ID NO: 19840 - RNA, 18 nt, Artificial Sequence
  Synthetic
cccugggccccggugcug

SEQ ID NO: 19841 - RNA, 19 nt, Artificial Sequence
  Synthetic
ccccugggccccggugcug

SEQ ID NO: 19842 - RNA, 21 nt, Artificial Sequence
  Synthetic
agccccugggccccggugcug

SEQ ID NO: 19843 - RNA, 22 nt, Artificial Sequence
  Synthetic
uagccccugggccccggugcug

SEQ ID NO: 19844 - RNA, 23 nt, Artificial Sequence
  Synthetic
auagccccugggccccggugcug

SEQ ID NO: 19845 - RNA, 24 nt, Artificial Sequence
  Synthetic
aauagccccugggccccggugcug

SEQ ID NO: 19846 - RNA, 18 nt, Artificial Sequence
  Synthetic
uguucgcggcggcgucug

SEQ ID NO: 19847 - RNA, 19 nt, Artificial Sequence
  Synthetic
guguucgcggcggcgucug

SEQ ID NO: 19848 - RNA, 21 nt, Artificial Sequence
  Synthetic
cuguguucgcggcggcgucug

SEQ ID NO: 19849 - RNA, 22 nt, Artificial Sequence
  Synthetic
acuguguucgcggcggcgucug

SEQ ID NO: 19850 - RNA, 23 nt, Artificial Sequence
  Synthetic
aacuguguucgcggcggcgucug

SEQ ID NO: 19851 - RNA, 24 nt, Artificial Sequence
  Synthetic
gaacuguguucgcggcggcgucug

SEQ ID NO: 19852 - RNA, 18 nt, Artificial Sequence
  Synthetic
acuacgcgacccuuggug

SEQ ID NO: 19853 - RNA, 19 nt, Artificial Sequence
  Synthetic
gacuacgcgacccuuggug

SEQ ID NO: 19854 - RNA, 21 nt, Artificial Sequence
  Synthetic
ucgacuacgcgacccuuggug

SEQ ID NO: 19855 - RNA, 22 nt, Artificial Sequence
  Synthetic
aucgacuacgcgacccuuggug

SEQ ID NO: 19856 - RNA, 23 nt, Artificial Sequence
  Synthetic
gaucgacuacgcgacccuuggug

SEQ ID NO: 19857 - RNA, 24 nt, Artificial Sequence
  Synthetic
agaucgacuacgcgacccuuggug

SEQ ID NO: 19858 - RNA, 18 nt, Artificial Sequence
  Synthetic
ucaugcacgaccccuuug

SEQ ID NO: 19859 - RNA, 19 nt, Artificial Sequence
  Synthetic
gucaugcacgaccccuuug

SEQ ID NO: 19860 - RNA, 21 nt, Artificial Sequence
  Synthetic
aggucaugcacgaccccuuug

SEQ ID NO: 19861 - RNA, 22 nt, Artificial Sequence
  Synthetic
caggucaugcacgaccccuuug

SEQ ID NO: 19862 - RNA, 23 nt, Artificial Sequence
  Synthetic
acaggucaugcacgaccccuuug

SEQ ID NO: 19863 - RNA, 24 nt, Artificial Sequence
  Synthetic
cacaggucaugcacgaccccuuug

SEQ ID NO: 19864 - RNA, 18 nt, Artificial Sequence
  Synthetic
cccccaggaccccauuau

SEQ ID NO: 19865 - RNA, 19 nt, Artificial Sequence
  Synthetic
gcccccaggaccccauuau

SEQ ID NO: 19866 - RNA, 21 nt, Artificial Sequence
  Synthetic
gcgcccccaggaccccauuau

SEQ ID NO: 19867 - RNA, 22 nt, Artificial Sequence
  Synthetic
ugcgcccccaggaccccauuau

SEQ ID NO: 19868 - RNA, 23 nt, Artificial Sequence
  Synthetic
cugcgcccccaggaccccauuau

SEQ ID NO: 19869 - RNA, 24 nt, Artificial Sequence
  Synthetic
gcugcgcccccaggaccccauuau

SEQ ID NO: 19870 - RNA, 18 nt, Artificial Sequence
  Synthetic
aggucaugcacgaccccu

SEQ ID NO: 19871 - RNA, 19 nt, Artificial Sequence
  Synthetic
caggucaugcacgaccccu

SEQ ID NO: 19872 - RNA, 21 nt, Artificial Sequence
  Synthetic
cacaggucaugcacgaccccu

SEQ ID NO: 19873 - RNA, 22 nt, Artificial Sequence
  Synthetic
gcacaggucaugcacgaccccu

SEQ ID NO: 19874 - RNA, 23 nt, Artificial Sequence
  Synthetic
cgcacaggucaugcacgaccccu

SEQ ID NO: 19875 - RNA, 24 nt, Artificial Sequence
  Synthetic
gcgcacaggucaugcacgaccccu

SEQ ID NO: 19876 - RNA, 18 nt, Artificial Sequence
  Synthetic
agaccagacgggucuccu

SEQ ID NO: 19877 - RNA, 19 nt, Artificial Sequence
  Synthetic
gagaccagacgggucuccu

SEQ ID NO: 19878 - RNA, 21 nt, Artificial Sequence
  Synthetic
ccgagaccagacgggucuccu

SEQ ID NO: 19879 - RNA, 22 nt, Artificial Sequence
  Synthetic
gccgagaccagacgggucuccu

SEQ ID NO: 19880 - RNA, 23 nt, Artificial Sequence
  Synthetic
cgccgagaccagacgggucuccu

SEQ ID NO: 19881 - RNA, 24 nt, Artificial Sequence
  Synthetic
acgccgagaccagacgggucuccu

SEQ ID NO: 19882 - RNA, 18 nt, Artificial Sequence
  Synthetic
ugguccugcgcuccaucu

SEQ ID NO: 19883 - RNA, 19 nt, Artificial Sequence
  Synthetic
uugguccugcgcuccaucu

SEQ ID NO: 19884 - RNA, 21 nt, Artificial Sequence
  Synthetic
gguugguccugcgcuccaucu

SEQ ID NO: 19885 - RNA, 22 nt, Artificial Sequence
  Synthetic
cgguugguccugcgcuccaucu

SEQ ID NO: 19886 - RNA, 23 nt, Artificial Sequence
  Synthetic
gcgguugguccugcgcuccaucu

SEQ ID NO: 19887 - RNA, 24 nt, Artificial Sequence
  Synthetic
cgcgguugguccugcgcuccaucu

SEQ ID NO: 19888 - RNA, 18 nt, Artificial Sequence
  Synthetic
gacccuuggugucggggu

SEQ ID NO: 19889 - RNA, 19 nt, Artificial Sequence
  Synthetic
cgacccuuggugucggggu

SEQ ID NO: 19890 - RNA, 21 nt, Artificial Sequence
  Synthetic
cgcgacccuuggugucggggu

SEQ ID NO: 19891 - RNA, 22 nt, Artificial Sequence
  Synthetic
acgcgacccuuggugucggggu

SEQ ID NO: 19892 - RNA, 23 nt, Artificial Sequence
  Synthetic
uacgcgacccuuggugucggggu

SEQ ID NO: 19893 - RNA, 24 nt, Artificial Sequence
  Synthetic
cuacgcgacccuuggugucggggu

SEQ ID NO: 19894 - RNA, 18 nt, Artificial Sequence
  Synthetic
cggcgucuggcggacauu

SEQ ID NO: 19895 - RNA, 19 nt, Artificial Sequence
  Synthetic
gcggcgucuggcggacauu

SEQ ID NO: 19896 - RNA, 21 nt, Artificial Sequence
  Synthetic
cggcggcgucuggcggacauu

SEQ ID NO: 19897 - RNA, 22 nt, Artificial Sequence
  Synthetic
gcggcggcgucuggcggacauu

SEQ ID NO: 19898 - RNA, 23 nt, Artificial Sequence
  Synthetic
cgcggcggcgucuggcggacauu

SEQ ID NO: 19899 - RNA, 24 nt, Artificial Sequence
  Synthetic
ucgcggcggcgucuggcggacauu

SEQ ID NO: 19900 - RNA, 18 nt, Artificial Sequence
  Synthetic
ggucaugcacgaccccuu

SEQ ID NO: 19901 - RNA, 19 nt, Artificial Sequence
  Synthetic
aggucaugcacgaccccuu

SEQ ID NO: 19902 - RNA, 21 nt, Artificial Sequence
  Synthetic
acaggucaugcacgaccccuu

SEQ ID NO: 19903 - RNA, 22 nt, Artificial Sequence
  Synthetic
cacaggucaugcacgaccccuu

SEQ ID NO: 19904 - RNA, 23 nt, Artificial Sequence
  Synthetic
gcacaggucaugcacgaccccuu

SEQ ID NO: 19905 - RNA, 24 nt, Artificial Sequence
  Synthetic
cgcacaggucaugcacgaccccuu

SEQ ID NO: 19906 - RNA, 18 nt, Artificial Sequence
  Synthetic
gucaugcacgaccccuuu

SEQ ID NO: 19907 - RNA, 19 nt, Artificial Sequence
  Synthetic
ggucaugcacgaccccuuu

SEQ ID NO: 19908 - RNA, 21 nt, Artificial Sequence
  Synthetic
caggucaugcacgaccccuuu

SEQ ID NO: 19909 - RNA, 22 nt, Artificial Sequence
  Synthetic
acaggucaugcacgaccccuuu

SEQ ID NO: 19910 - RNA, 23 nt, Artificial Sequence
  Synthetic
cacaggucaugcacgaccccuuu

SEQ ID NO: 19911 - RNA, 24 nt, Artificial Sequence
  Synthetic
gcacaggucaugcacgaccccuuu

SEQ ID NO: 19912 - RNA, 17 nt, Artificial Sequence
  Synthetic
gaacacuccccgcugcu

SEQ ID NO: 19913 - RNA, 20 nt, Artificial Sequence
  Synthetic
gaggaacacuccccgcugcu

SEQ ID NO: 19914 - RNA, 17 nt, Artificial Sequence
  Synthetic
cguccgccgcgggcagg

SEQ ID NO: 19915 - RNA, 17 nt, Artificial Sequence
  Synthetic
uggcggucgaugcggcc

SEQ ID NO: 19916 - RNA, 17 nt, Artificial Sequence
  Synthetic
cuccuggcggugcgugu

SEQ ID NO: 19917 - RNA, 20 nt, Artificial Sequence
  Synthetic
ccuuggcggucgaugcggcc

SEQ ID NO: 19918 - RNA, 20 nt, Artificial Sequence
  Synthetic
cggggcggggucccccaggg
